(19) United States
(12) Patent Application Publication
(10) Pub. No.: US 2024/0110179 A1
(43) Pub. Date: Apr. 4, 2024

(54) SYSTEMS AND METHODS FOR TREATING ALPHA 1-ANTITRYPSIN (A1AT) DEFICIENCY

(71) Applicant: EDITAS MEDICINE, INC., Cambridge, MA (US)

(72) Inventors: Shen SHEN, Watertown, MA (US); Penrose O'DONNELL, Yarmouth, ME (US); Minerva SANCHEZ, Brookline, MA (US)

(73) Assignee: EDITAS MEDICINE, INC., Cambridge, MA (US)

(21) Appl. No.: 18/059,213

(22) Filed: Nov. 28, 2022

Related U.S. Application Data
(63) Continuation of application No. 16/088,430, filed on Sep. 25, 2018, now Pat. No. 11,512,311.
(60) Provisional application No. 62/452,333, filed on Jan. 30, 2017.
(60) Provisional application No. 62/313,688, filed on Mar. 25, 2016.

(51) Int. Cl. C12N 15/113; C12N 9/22; C12N 15/86

(52) U.S. Cl. CPC C12N 15/113; C12N 9/22; C12N 15/86; C12N 2310/20

(57) ABSTRACT

CRISPR/RNA-guided nuclease-related compositions and methods for treatment of A1AT deficiency and associated conditions are disclosed.

### REFERENCE TO RELATED APPLICATIONS

[0001] The present application is a continuation of U.S. application Ser. No. 16/088,430, filed Sep. 25, 2018, which is a U.S. national phase application of International Patent Appl. No. PCT/US2017/024163, filed Mar. 24, 2017, which claims the benefit of U.S. Provisional Appl. No. 62/452,333, filed Jan. 30, 2017, and U.S. Provisional Appl. No. 62/313,688, filed Mar. 25, 2016. The contents of which are incorporated by reference herein in their entirety, including drawings.

### SEQUENCE LISTING

[0002] This application contains a Sequence Listing, which was submitted in XML format via Patent Center, and is hereby incorporated by reference in its entirety. The XML copy, created on Apr. 27, 2023, is named Replacement Sequence Listing 1189458007US04.xml and is 2,862,000 B in size.

### FIELD OF THE INVENTION

[0003] The invention relates to CRISPR/RNA-guided nuclease related methods and components for editing of a target nucleic acid sequence, or modulating expression of a target nucleic acid sequence, and applications thereof in connection with alpha 1-antitrypsin (A1AT) deficiency.

### BACKGROUND

[0004] Alpha-1 antitrypsin (A1AT) deficiency (AATD) is a genetic disease caused by defects in the SERPINA1 gene. Severe A1AT deficiency is associated with lung and liver disease. Lung disease associated with A1AT deficiency is currently treated with intravenous administration of human-derived replacement A1AT protein, but in addition to being costly and requiring frequent injections over a subject's entire lifetime, this approach is only partially effective. A1AT-deficient subjects with hepatocellular carcinoma are currently treated with chemotherapy and surgery, but there is no satisfactory approach for preventing the potentially deadly liver manifestations of A1AT deficiency. Thus, there is a need for improved methods and compositions for treating A1AT deficiency, including both liver and lung manifestations thereof.

### SUMMARY OF THE INVENTION

[0005] Methods and compositions discussed herein, provide for treating or delaying the onset or progression of diseases of the liver, lung, monocytes, or macrophages, e.g., disorders that affect hepatocytes, e.g., disorders that affect lung epithelium and/or lung parenchyma, e.g., disorders that affect macrophages, or e.g., disorders that affect monocytes.

[0006] Methods and compositions discussed herein, provide for treating or delaying the onset or progression of alpha-1 antitrypsin deficiency (A1AT deficiency). While much of the disclosure herein is presented in the context of the mutation in the SERPINA1 gene that gives rise to an A1AT mutant protein having a mutation at E342, E264, or both, e.g., an A1AT mutant protein having an E342K substitution, an E264V substitution, or both, the methods and compositions herein are broadly applicable to any mutation, e.g., a point mutation or a deletion, in the SERPINA1 gene that gives rise to A1AT deficiency.

[0007] In one aspect, methods and compositions discussed herein, provide for the correction of the underlying genetic cause of A1AT deficiency, e.g., the correction of a mutation at a target position in the SERPINA1 gene resulting in correction of a mutation of an A1AT protein at amino acid position 342, 264, or both (e.g., an E342K substitution, an E264V substitution, or both). As used herein, “A1AT protein” and “AAT protein” can be used interchangeably.

[0008] Mutations in the SERPINA1 gene have been shown to cause A1AT deficiency. Mutations leading to A1AT deficiency can be described based on their target positions in the SERPINA1 gene that encode the mutated amino acids. In an embodiment, an A1AT target position comprises or consists of one or more nucleotide mutations in the SERPINA1 gene, which results in expression of an A1AT mutant protein comprising an amino acid mutation at E342 (e.g., residue 366 in SEQ ID NO:252). In certain embodiments, the A1AT target position comprises or consists of a nucleotide mutation at position c.1024 in the SERPINA1 gene (e.g., NT 13990 in SEQ ID NO:2231), which results in expression of an A1AT mutant protein comprising an amino acid mutation at E342. In certain embodiments, the A1AT target position comprises or consists of the nucleotide mutation c.1024G>A in the SERPINA1 gene, which results in the expression of an A1AT mutant protein comprising the amino acid mutation E342K. In certain embodiments, the A1AT target position comprises or consists of a nucleotide mutation in the SERPINA1 gene, which results in expression of an A1AT mutant protein comprising an amino acid mutation at E264 at residue 288 in SEQ ID NO:252. In certain embodiments, the A1AT target position comprises or consists of a nucleotide mutation at position c.791 in the SERPINA1 gene (e.g., NT 11675 in SEQ ID NO:2231), which results in expression of an A1AT mutant protein comprising an amino acid mutation at E264. In certain embodiments, the A1AT target position comprises or consists of a nucleotide mutation c.791A>T in the SERPINA1 gene, which results in the expression of an A1AT mutant protein comprising the amino acid mutation E264V. In an embodiment, the A1AT target position comprises or consists of nucleotide mutations at positions c.1024 and c.791 in the SERPINA1 gene, which results in expression of an A1AT mutant protein comprising amino acid mutations at E342 and E264. In an embodiment, the A1AT target position comprises or consists of nucleotide mutations c.1024G>A and c.791A>T in the SERPINA1 gene, which results in expression of an A1AT mutant protein comprising the amino acid mutations E342K and E264V. In certain embodiments, the A1AT target position comprising or consisting of a nucleotide mutation at position c.1024 in the SERPINA1 gene (e.g., NT 13990 in SEQ ID NO:2231) is an A1AT target point position. In certain embodiments, the A1AT target position comprising or consisting of a nucleotide mutation at position c.791 in the SERPINA1 gene (e.g., NT 11675 in SEQ ID NO:2231) is an A1AT target point position.

[0009] While not wishing to be bound by theory, it is believed that, in an embodiment, a mutation at an A1AT target point position in the SERPINA1 gene is corrected, e.g., by homology directed repair (HDR), as described herein.

[0010] In one aspect, methods and compositions discussed herein may be used to alter the SERPINA1 gene to treat or prevent A1AT deficiency, by targeting the SERPINA1 gene, e.g., coding or non-coding regions of the SERPINA1 gene. In an embodiment, altering the SERPINA1 gene refers to reducing or eliminating (1) SERPINA1 gene expression, (2) SERPINA1 protein function, or (3) the level of SERPINA1 protein.

[0011] In an embodiment, the coding region (e.g., an early coding region) of the SERPINA1 gene is targeted for alteration. In an embodiment, a non-coding sequence (e.g., a promoter region, an enhancer region, an intron, 5′UTR, 3′UTR, or polyadenylation signal) is targeted for alteration. In an embodiment, Exon II is targeted for alteration. In an embodiment, the start codon in Exon II is targeted for alteration. In an embodiment, Exon V is targeted for alteration. In an embodiment, Exon IV is targeted for alteration.

[0012] In an embodiment, the method provides an alteration that comprises disrupting the SERPINA1 gene by the insertion or deletion of one or more nucleotides mediated by an RNA-guided nuclease (e.g., Cas9 (e.g., enzymatically active Cas9 (eaCas9), e.g., Cas9 nuclease or Cas9 nickase) as described below). This type of alteration is also referred to as “knocking out” the SERPINA1 gene.

[0013] In an embodiment, the methods and compositions discussed herein may be used to alter the SERPINA1 gene to treat or prevent A1AT deficiency by knocking out one or both alleles of the SERPINA1 gene. In an embodiment, the coding region (e.g., an early coding region) of the SERPINA1 gene, is targeted to alter the gene. In an embodiment, a non-coding region of the SERPINA1 gene (e.g., an enhancer region, a promoter region, an intron, 5′ UTR, 3′UTR, polyadenylation signal) is targeted to alter the gene. In an embodiment, Exon II is targeted for alteration. In an embodiment, the start codon in Exon II is targeted for alteration. In an embodiment, Exon V is targeted for alteration. In an embodiment, Exon IV is targeted for alteration. In an embodiment, the method provides an alteration that comprises an insertion or deletion of one or more nucleotides. As described herein, in an embodiment, a targeted knockout approach is mediated by non-homologous end joining (NHEJ) using a CRISPR/RNA-guided nuclease system comprising an enzymatically active RNA-guided nuclease (e.g., enzymatically active Cas9 (eaCas9)). In an embodiment, a targeted knockout approach alters the SERPINA1 gene. In an embodiment, a targeted knockout approach reduces or eliminates expression of functional SERPINA1 gene product. In an embodiment, targeting affects one or both alleles of the SERPINA1 gene.

[0014] While not wishing to be bound by theory, it is believed that, in an embodiment, the A1AT target knockout position is altered, e.g., disrupted by insertion or deletion (e.g., indel) of one or more nucleotides, by NHEJ-mediated alteration, as described herein.

[0015] In an embodiment, methods and compositions discussed herein, provide for altering (e.g., knocking out) the SERPINA1 gene. In an embodiment, knocking out the SERPINA1 gene refers to (1) insertion or deletion (e.g., NHEJ-mediated insertion or deletion (e.g., indel)) of one or more nucleotides in close proximity to or within the early coding region of the SERPINA1 gene, or (2) deletion (e.g., NHEJ-mediated deletion) of a genomic sequence including at least a portion of the SERPINA1 gene.

[0016] In an embodiment, the A1AT target knockout position is altered by genome editing using the CRISPR/RNA-guided nuclease (e.g., Cas9) system. The A1AT target knockout position may be targeted by cleaving with either a single nuclease or dual nickases, e.g., to induce insertion or deletion (e.g., NHEJ-mediated insertion or deletion) of one or more nucleotides in close proximity to or within the early coding region of the A1AT target knockout position of the SERPINA1 gene.

[0017] In an embodiment, the methods and compositions described herein introduce one or more breaks in close proximity to or within the early coding region in at least one allele of the SERPINA1 gene. In an embodiment, a single strand break is introduced in close proximity to or within the early coding region in at least one allele of the SERPINA1 gene. In an embodiment, the single strand break will be accompanied by an additional single strand break, positioned by a second gRNA molecule.

[0018] In an embodiment, a double strand break is introduced in close proximity to or within the early coding region in at least one allele of the SERPINA1 gene. In an embodiment, a double strand break will be accompanied by an additional single strand break positioned by a second gRNA molecule. In an embodiment, a double strand break will be accompanied by two additional single strand breaks positioned by a second gRNA molecule and a third gRNA molecule.

[0019] In an embodiment, a pair of single strand breaks is introduced in close proximity to or within the early coding region in at least one allele of the SERPINA1 gene. In an embodiment, the pair of single strand breaks will be accompanied by an additional double strand break, positioned by a third gRNA molecule. In an embodiment, the pair of single strand breaks will be accompanied by an additional pair of single strand breaks positioned by a third gRNA molecule and a fourth gRNA molecule.

[0020] In an embodiment, the methods and compositions discussed herein may be used to alter the SERPINA1 gene to treat or prevent A1AT deficiency by knocking in a SERPINA1 sequence. In an embodiment, altering the SERPINA1 gene refers to increasing or restoring (1) SERPINA1 gene expression, (2) SERPINA1 protein function, or (3) the level of SERPINA1 protein.

[0021] While not wishing to be bound by theory, it is believed that, in an embodiment, a sequence is inserted, e.g., by homology directed repair (HDR), as described herein.

[0022] Exemplary A1AT target knockin positions include, but are not limited to, a sequence between the promoter region and translation state codon, into which, e.g., a sequence that codes for Exons II-V of the SERPINA1 gene can be introduced; a sequence at or near the -translation start codon, into which, e.g., a sequence that codes for Exons II-V of the SERPINA1 gene can be introduced; a sequence between Exon 1C and Exon II, into which, e.g., a sequence that codes for Exons II-V of the SERPINA1 gene can be introduced; a sequence between Exons II and III, into which a sequence that codes for Exons III-V of the SERPINA1 gene can be introduced.

[0023] In an embodiment, a target knockin position includes an intronic sequence between a first and a second exon, and a sequence encoding the second exon through the final exon (e.g., Exons II-V), is introduced, resulting in a sequence that is free of the S mutation, E264V, or the Z mutation, E342K. In an embodiment, a target knockin position is a position which is upstream of a mutation, or upstream of an exon having a mutation, and an insertion (e.g., HDR-mediated insertion) results in a sequence that is free of the mutation. In an embodiment, the target knockin position is in an intronic sequence: between Exon 1A and Exon 1B; between Exon 1B and Exon 1C; between Exon 1C and Exon II; between Exon II and Exon III; between Exon III and Exon IV; or between Exon IV and Exon V. In an embodiment, the resulting sequence comprises subject sequence upstream from the target knockin position and a newly introduced sequence downstream from the target knockin position, which taken together, encode a protein having wild-type activity. In an embodiment, the point of insertion is 3′ to a splice donor site and 5′ from a splice acceptor site. In an embodiment, a sequence encoding Exons II-V is inserted under control of a promoter, e.g., at or near the translation start codon. In an embodiment, the promoter is an endogenous promoter. In an embodiment, the promoter is an exogenous promoter. In an embodiment, the promoter is a synthetic promoter. In an embodiment, the sequence introduced can exclude introns, e.g., a sequence encoding exons, but without introns, is inserted.

[0024] In an embodiment, the methods and compositions discussed herein may be used to alter the SERPINA1 gene to treat or prevent A1AT deficiency by knocking down one or both alleles of the SERPINA1 gene. In one embodiment, the coding region of the SERPINA1 gene, is targeted to alter the gene. In another embodiment, a non-coding region (e.g., an enhancer region, a promoter region, an intron, 5′ UTR, 3′ UTR, polyadenylation signal) of the SERPINA1 gene is targeted to alter the gene. In an embodiment, the promoter region of the SERPINA1 gene is targeted to knock down the expression of the SERPINA1 gene. A targeted knockdown approach alters, e.g., reduces or eliminates the expression of the SERPINA1 gene.

[0025] In one aspect, disclosed herein is a gRNA molecule, e.g., an isolated or non-naturally occurring gRNA molecule, comprising a targeting domain which is complementary or partially complementary with a target domain from the SERPINA1 gene.

[0026] When two or more gRNAs are used to position two or more cleavage events, e.g., double strand or single strand breaks, in a target nucleic acid, it is contemplated that the two or more cleavage events may be made by the same or different RNA-guided nucleases (e.g., Cas9 proteins (e.g., enzymatically active Cas9 (eaCas9), e.g., Cas9 nuclease or Cas9 nickase) as described below). For example, when two gRNAs are used to position two double strand breaks, a single Cas9 nuclease may be used to create both double strand breaks. When two or more gRNAs are used to position two or more single stranded breaks (single strand breaks), a single Cas9 nickase may be used to create the two or more single strand breaks. When two or more gRNAs are used to position at least one double strand break and at least one single strand break, two Cas9 proteins may be used, e.g., one Cas9 nuclease and one Cas9 nickase. It is contemplated that when two or more Cas9 proteins are used that the two or more Cas9 proteins may be delivered sequentially to control specificity of a double strand versus a single strand break at the desired position in the target nucleic acid.

[0027] In an embodiment, the targeting domain of the first gRNA molecule and the targeting domain of the second gRNA molecule hybridize to the target domain through complementary base pairing to opposite strands of the target nucleic acid molecule. In an embodiment, the gRNA molecule and the second gRNA molecule are configured such that the PAMs are oriented outward.

[0028] In an embodiment, the targeting domain of a gRNA molecule is configured to avoid unwanted target chromosome elements, such as repeat elements, e.g., an Alu repeat, or the endogenous splice sites, in the target domain. The gRNA molecule may be a first, second, third and/or fourth gRNA molecule.

[0029] In an embodiment, the targeting domain of a gRNA molecule is configured to position a cleavage event sufficiently far from a preselected nucleotide, e.g., the nucleotide of a coding region, such that the nucleotide is not altered. In an embodiment, the targeting domain of a gRNA molecule is configured to position an intronic cleavage event sufficiently far from an intron/exon border, or naturally occurring splice signal, to avoid alteration of the exonic sequence or unwanted splicing events. The gRNA molecule may be a first, second, third and/or fourth gRNA molecule, as described herein.

[0030] In certain embodiments, the targeting domain of a gRNA molecule comprises a sequence that is the same as, or differs by no more than 1, 2, 3, 4, or 5 nucleotides from, a targeting domain sequence described herein, e.g., a targeting domain sequence set forth in any of SEQ ID NOs:253-2192. In certain of these embodiments, the targeting domain comprises a sequence that is the same as a targeting domain sequence set forth in any of SEQ ID NOs:253-2192.

[0031] In certain embodiments, a point mutation in the SERPINA1 gene, e.g., resulting in expression of a A1AT mutant protein comprising an amino acid mutation at E342, e.g., E342K, is targeted, e.g., for correction. In certain embodiments, the targeting domain of a gRNA molecule comprises a sequence that is the same as, or differs by no more than 1, 2, 3, 4, or 5 nucleotides from, a targeting domain sequence set forth in Table 6. In certain of these embodiments, the targeting domain comprises a sequence set forth in Table 6.

[0032] In certain embodiments, Exon II in the SERPINA1 gene, e.g., at or near the start codon, is targeted, e.g., for knockout or knockin. In certain embodiments, the targeting domain of a gRNA molecule comprises a sequence that is the same as, or differs by no more than 1, 2, 3, 4, or 5 nucleotides from, a targeting domain sequence set forth in Table 9. In certain of these embodiments, the targeting domain comprises a sequence set forth in Table 9.

[0033] In certain embodiments, a coding sequence in the SERPINA1 gene, e.g., Exon V or IV, is targeted, e.g., for knockout. In certain embodiments, the targeting domain of a gRNA molecule comprises a sequence that is the same as, or differs by no more than 1, 2, 3, 4, or 5 nucleotides from, a targeting domain sequence set forth in Tables 7 or 8. In certain of these embodiments, the targeting domain comprises a sequence set forth in Table 7 or 8.

[0034] In certain embodiments, a targeting domain that is fully or partially complementary to a sequence in or near the SERPINA1 gene is 16 nucleotides or more in length. For example, the targeting domain may be 16, 17, 18, 19, 20, 21, 22, 23, 24, 25, or 26 nucleotides in length.

[0035] In certain embodiments, the gRNA, e.g., a gRNA comprising a targeting domain fully or partially is complementary with a sequence in or near the SERPINA1 gene is a modular gRNA. In other embodiments, the gRNA is a unimolecular or chimeric gRNA.

[0036] A gRNA as described herein may comprise from 5′ to 3′: a targeting domain (comprising a “core domain” and, optionally, a “secondary domain”); a first complementarity domain; a linking domain; a second complementarity domain; a proximal domain; and a tail domain. In an embodiment, the proximal domain and tail domain are taken together as a single domain.

[0037] In an embodiment, a gRNA comprises a linking domain of no more than 25 nucleotides in length; a proximal and tail domain, that taken together, are at least 20 nucleotides in length; and a targeting domain equal to or greater than 16, 17, 18, 19, 20, 21, 22, 23, 24, 25 or 26 nucleotides in length.

[0038] In another embodiment, a gRNA comprises a linking domain of no more than 25 nucleotides in length; a proximal and tail domain, that taken together, are at least 25 nucleotides in length; and a targeting domain equal to or greater than 16, 17, 18, 19, 20, 21, 22, 23, 24, 25 or 26 nucleotides in length.

[0039] In another embodiment, a gRNA comprises a linking domain of no more than 25 nucleotides in length; a proximal and tail domain, that taken together, are at least 30 nucleotides in length; and a targeting domain equal to or greater than 16, 17, 18, 19, 20, 21, 22, 23, 24, 25 or 26 nucleotides in length.

[0040] In another embodiment, a gRNA comprises a linking domain of no more than 25 nucleotides in length; a proximal and tail domain, that taken together, are at least 40 nucleotides in length; and a targeting domain equal to or greater than 16, 17, 18, 19, 20, 21, 22, 23, 24, 25 or 26 nucleotides in length.

[0041] A cleavage event, e.g., a double strand or single strand break, is generated by an RNA-guided nuclease (e.g., Cas9 molecule). The Cas9 molecule may be an enzymatically active Cas9 (eaCas9) molecule, e.g., an eaCas9 molecule that forms a double strand break in a target nucleic acid or an eaCas9 molecule forms a single strand break in a target nucleic acid (e.g., a nickase molecule).

[0042] In an embodiment, the eaCas9 molecule catalyzes a double strand break.

[0043] In an embodiment, the eaCas9 molecule comprises HNH-like domain cleavage activity but has no, or no significant, N-terminal RuvC-like domain cleavage activity. In this case, the eaCas9 molecule is an HNH-like domain nickase, e.g., the eaCas9 molecule comprises a mutation at D10, e.g., D10A. In another embodiment, the eaCas9 molecule comprises N-terminal RuvC-like domain cleavage activity but has no, or no significant, HNH-like domain cleavage activity. In an embodiment, the eaCas9 molecule is an N-terminal RuvC-like domain nickase, e.g., the eaCas9 molecule comprises a mutation at H840, e.g., H840A. In an embodiment, the eaCas9 molecule is an N-terminal RuvC-like domain nickase, e.g., the eaCas9 molecule comprises a mutation at N863, e.g., N863A. In an embodiment, the eaCas9 molecule is an N-terminal RuvC-like domain nickase, e.g., the eaCas9 molecule comprises a mutation at N580, e.g., N580A.

[0044] In an embodiment, a single strand break is formed in the strand of the target nucleic acid to which the targeting domain of said gRNA is complementary. In another embodiment, a single strand break is formed in the strand of the target nucleic acid other than the strand to which the targeting domain of said gRNA is complementary.

[0045] In another aspect, disclosed herein is a nucleic acid, e.g., an isolated or non-naturally occurring nucleic acid, e.g., DNA, that comprises (a) a sequence that encodes a gRNA molecule comprising a targeting domain that is complementary with a target domain, e.g., with an A1AT target position, in the SERPINA1 gene as disclosed herein.

[0046] In an embodiment, the nucleic acid encodes a gRNA molecule, e.g., a first gRNA molecule, comprising a targeting domain configured to provide a cleavage event, e.g., a double strand break or a single strand break, sufficiently close to an A1AT target position in the SERPINA1 gene to allow alteration, e.g., alteration associated with HDR or NHEJ, of the an A1AT target position in the SERPINA1 gene.

[0047] In an embodiment, the nucleic acid encodes a modular gRNA, e.g., one or more nucleic acids encode a modular gRNA. In another embodiment, the nucleic acid encodes a chimeric gRNA. The nucleic acid may encode a gRNA, e.g., the first gRNA molecule, comprising a targeting domain comprising 16 nucleotides or more in length. In one embodiment, the nucleic acid encodes a gRNA, e.g., the first gRNA molecule, comprising a targeting domain that is 16 nucleotides in length. In another embodiment, the nucleic acid encodes a gRNA, e.g., the first gRNA molecule, comprising a targeting domain that is 17 nucleotides in length. In still another embodiment, the nucleic acid encodes a gRNA, e.g., the first gRNA molecule, comprising a targeting domain that is 18 nucleotides in length. In still another embodiment, the nucleic acid encodes a gRNA, e.g., the first gRNA molecule, comprising a targeting domain that is 19 nucleotides in length. In still another embodiment, the nucleic acid encodes a gRNA, e.g., the first gRNA molecule, comprising a targeting domain that is 20 nucleotides in length. In still another embodiment, the nucleic acid encodes a gRNA, e.g., the first gRNA molecule, comprising a targeting domain that is 21 nucleotides in length. In still another embodiment, the nucleic acid encodes a gRNA, e.g., the first gRNA molecule, comprising a targeting domain that is 22 nucleotides in length. In still another embodiment, the nucleic acid encodes a gRNA, e.g., the first gRNA molecule, comprising a targeting domain that is 23 nucleotides in length. In still another embodiment, the nucleic acid encodes a gRNA, e.g., the first gRNA molecule, comprising a targeting domain that is 24 nucleotides in length. In still another embodiment, the nucleic acid encodes a gRNA, e.g., the first gRNA molecule, comprising a targeting domain that is 25 nucleotides in length. In still another embodiment, the nucleic acid encodes a gRNA, e.g., the first gRNA molecule, comprising a targeting domain that is 26 nucleotides in length.

[0048] In an embodiment, a nucleic acid encodes a gRNA comprising from 5′ to 3′: a targeting domain (comprising a “core domain” and, optionally, a “secondary domain”); a first complementarity domain; a linking domain; a second complementarity domain; a proximal domain; and a tail domain. In an embodiment, the proximal domain and tail domain are taken together as a single domain.

[0049] In an embodiment, a nucleic acid encodes a gRNA e.g., the first gRNA molecule, comprising a linking domain of no more than 25 nucleotides in length; a proximal and tail domain, that taken together, are at least 20 nucleotides in length; and a targeting domain equal to or greater than 16, 17, 18, 19, 20, 21, 22, 23, 24, 25 or 26 nucleotides in length.

[0050] In an embodiment, a nucleic acid encodes a gRNA e.g., the first gRNA molecule, comprising a linking domain of no more than 25 nucleotides in length; a proximal and tail domain, that taken together, are at least 30 nucleotides in length; and a targeting domain equal to or greater than 16, 17, 18, 19, 20, 21, 22, 23, 24, 25 or 26 nucleotides in length.

[0051] In an embodiment, a nucleic acid encodes a gRNA e.g., the first gRNA molecule, comprising a linking domain of no more than 25 nucleotides in length; a proximal and tail domain, that taken together, are at least 30 nucleotides in length; and a targeting domain equal to or greater than 16, 17, 18, 19, 20, 21, 22, 23, 24, 25 or 26 nucleotides in length.

[0052] In an embodiment, a nucleic acid encodes a gRNA comprising e.g., the first gRNA molecule, a linking domain of no more than 25 nucleotides in length; a proximal and tail domain, that taken together, are at least 40 nucleotides in length; and a targeting domain equal to or greater than 16, 17, 18, 19, 20, 21, 22, 23, 24, 25 or 26 nucleotides in length.

[0053] In an embodiment, a nucleic acid comprises (a) a sequence that encodes a gRNA molecule e.g., the first gRNA molecule, comprising a targeting domain that is complementary with a target domain in the SERPINA1 gene as disclosed herein, and further comprising (b) a sequence that encodes an RNA-guided nuclease (e.g., a Cas9 molecule).

[0054] The Cas9 molecule may be an enzymatically active Cas9 (eaCas9) molecule, e.g., an eaCas9 molecule that forms a double strand break in a target nucleic acid or an eaCas9 molecule forms a single strand break in a target nucleic acid (e.g., a nickase molecule).

[0055] A nucleic acid disclosed herein may comprise (a) a sequence that encodes a gRNA molecule comprising a targeting domain that is complementary with a target domain in the SERPINA1 gene as disclosed herein; (b) a sequence that encodes an RNA-guided nuclease (e.g., a Cas9 molecule); and further comprises (c)(i) a sequence that encodes a second gRNA molecule described herein having a targeting domain that is complementary to a second target domain of the SERPINA1 gene, and optionally, (c)(ii) a sequence that encodes a third gRNA molecule described herein having a targeting domain that is complementary to a third target domain of the SERPINA1 gene; and optionally, (c)(iii) a sequence that encodes a fourth gRNA molecule described herein having a targeting domain that is complementary to a fourth target domain of the SERPINA1 gene.

[0056] In an embodiment, a nucleic acid encodes a second gRNA molecule comprising a targeting domain configured to provide a cleavage event, e.g., a double strand break or a single strand break, sufficiently close to an A1AT target position in the SERPINA1 gene, to allow alteration, e.g., alteration associated with HDR or NHEJ, of an A1AT target position in the SERPINA1 gene, either alone or in combination with the break positioned by said first gRNA molecule.

[0057] In an embodiment, a nucleic acid encodes a third gRNA molecule comprising a targeting domain configured to provide a cleavage event, e.g., a double strand break or a single strand break, sufficiently close to an A1AT target position in the SERPINA1 gene to allow alteration, e.g., alteration associated with HDR or NHEJ, of an A1AT target position in the SERPINA1 gene, either alone or in combination with the break positioned by the first and/or second gRNA molecule.

[0058] In an embodiment, a nucleic acid encodes a fourth gRNA molecule comprising a targeting domain configured to provide a cleavage event, e.g., a double strand break or a single strand break, sufficiently close to an A1AT target position in the SERPINA1 gene to allow alteration, e.g., alteration associated with HDR or NHEJ, of an A1AT target position in the SERPINA1 gene, either alone or in combination with the break positioned by the first gRNA molecule, the second gRNA molecule and/or the third gRNA molecule.

[0059] In certain embodiments, the nucleic acid encodes a second gRNA molecule. The second gRNA is selected to target the same A1AT target position as the first gRNA molecule. Optionally, the nucleic acid may encode a third gRNA, and further optionally, the nucleic acid may encode a fourth gRNA molecule. The third gRNA molecule and the fourth gRNA molecule are selected to target the same A1AT target position as the first and/or second gRNA molecules.

[0060] In certain embodiments, the nucleic acid encodes a second gRNA molecule comprising a targeting domain comprising a sequence that is the same as, or differs by no more than 1, 2, 3, 4, or 5 nucleotides from, a targeting domain sequence set forth in SEQ ID NOs:253-2192. In certain of these embodiments, the nucleic acid encodes a second gRNA molecule comprising a targeting domain set forth in SEQ ID NOs:253-2192. In certain embodiments, when a third or fourth gRNA molecule are present, the third and fourth gRNA molecules may independently comprise a targeting domain comprising a sequence that is the same as, or differs by no more than 1, 2, 3, 4, or 5 nucleotides from, a targeting domain sequence set forth in SEQ ID NOs:253-2192. In a further embodiment, when a third or fourth gRNA molecule are present, the third and fourth gRNA molecules may independently comprise a targeting domain set forth in SEQ ID NOs:253-2192.

[0061] In an embodiment, the nucleic acid encodes a second gRNA which is a modular gRNA, e.g., wherein one or more nucleic acid molecules encode a modular gRNA. In another embodiment, the nucleic acid encoding a second gRNA is a chimeric gRNA. In another embodiment, when a nucleic acid encodes a third or fourth gRNA, the third and/or fourth gRNA may be a modular gRNA or a chimeric gRNA. When multiple gRNAs are used, any combination of modular or chimeric gRNAs may be used.

[0062] A nucleic acid may encode a second, a third, and/or a fourth gRNA comprising a targeting domain comprising 16 nucleotides or more in length. In an embodiment, the nucleic acid encodes a second gRNA comprising a targeting domain that is 16 nucleotides in length. In another embodiment, the nucleic acid encodes a second gRNA comprising a targeting domain that is 17 nucleotides in length. In still another embodiment, the nucleic acid encodes a second gRNA comprising a targeting domain that is 18 nucleotides in length. In still another embodiment, the nucleic acid encodes a second gRNA comprising a targeting domain that is 19 nucleotides in length. In still another embodiment, the nucleic acid encodes a second gRNA comprising a targeting domain that is 20 nucleotides in length. In still another embodiment, the nucleic acid encodes a second gRNA comprising a targeting domain that is 21 nucleotides in length. In still another embodiment, the nucleic acid encodes a second gRNA comprising a targeting domain that is 22 nucleotides in length. In still another embodiment, the nucleic acid encodes a second gRNA comprising a targeting domain that is 23 nucleotides in length. In still another embodiment, the nucleic acid encodes a second gRNA comprising a targeting domain that is 24 nucleotides in length. In still another embodiment, the nucleic acid encodes a second gRNA comprising a targeting domain that is 25 nucleotides in length. In still another embodiment, the nucleic acid encodes a second gRNA comprising a targeting domain that is 26 nucleotides in length.

[0063] In an embodiment, a nucleic acid encodes a second, a third, and/or a fourth gRNA comprising from 5′ to 3′: a targeting domain (comprising a “core domain” and, optionally, a “secondary domain”); a first complementarity domain; a linking domain; a second complementarity domain; a proximal domain; and a tail domain. In an embodiment, the proximal domain and tail domain are taken together as a single domain.

[0064] In an embodiment, a nucleic acid encodes a second, a third, and/or a fourth gRNA comprising a linking domain of no more than 25 nucleotides in length; a proximal and tail domain, that taken together, are at least 20 nucleotides in length; and a targeting domain equal to or greater than 16, 17, 18, 19, 20, 21, 22, 23, 24, 25 or 26 nucleotides in length.

[0065] In an embodiment, a nucleic acid encodes a second, a third, and/or a fourth gRNA comprising a linking domain of no more than 25 nucleotides in length; a proximal and tail domain, that taken together, are at least 30 nucleotides in length; and a targeting domain equal to or greater than 16, 17, 18, 19, 20, 21, 22, 23, 24, 25 or 26 nucleotides in length.

[0066] In an embodiment, a nucleic acid encodes a second, a third, and/or a fourth gRNA comprising a linking domain of no more than 25 nucleotides in length; a proximal and tail domain, that taken together, are at least 35 nucleotides in length; and a targeting domain equal to or greater than 16, 17, 18, 19, 20, 21, 22, 23, 24, 25 or 26 nucleotides in length.

[0067] In an embodiment, a nucleic acid encodes a second, a third, and/or a fourth gRNA comprising a linking domain of no more than 25 nucleotides in length; a proximal and tail domain, that taken together, are at least 40 nucleotides in length; and a targeting domain equal to or greater than 16, 17, 18, 19, 20, 21, 22, 23, 24, 25 or 26 nucleotides in length.

[0068] In an embodiment, when the SERPINA1 gene is corrected, e.g., by HDR, the nucleic acid encodes (a) a sequence that encodes a gRNA molecule comprising a targeting domain that is complementary with a target domain in the SERPINA1 gene as disclosed herein; (b) a sequence that encodes an RNA-guided nuclease (e.g., a Cas9 molecule); optionally, (c)(i) a sequence that encodes a second gRNA molecule described herein having a targeting domain that is complementary to a second target domain of the SERPINA1 gene, and further optionally, (c)(ii) a sequence that encodes a third gRNA molecule described herein having a targeting domain that is complementary to a third target domain of the SERPINA1 gene; and still further optionally, (c)(iii) a sequence that encodes a fourth gRNA molecule described herein having a targeting domain that is complementary to a fourth target domain of the SERPINA1 gene; and further may comprise (d) a template nucleic acid (in an embodiment where an exogenous template is used).

[0069] In an embodiment, when a sequence is inserted, e.g., by HDR, the nucleic acid encodes (a) a sequence that encodes a gRNA molecule comprising a targeting domain that is complementary with a target domain in the SERPINA1 gene as disclosed herein; (b) a sequence that encodes an RNA-guided nuclease (e.g., a Cas9 molecule); optionally, (c)(i) a sequence that encodes a second gRNA molecule described herein having a targeting domain that is complementary to a second target domain of the SERPINA1 gene, and further optionally, (c)(ii) a sequence that encodes a third gRNA molecule described herein having a targeting domain that is complementary to a third target domain of the SERPINA1 gene; and still further optionally, (c)(iii) a sequence that encodes a fourth gRNA molecule described herein having a targeting domain that is complementary to a fourth target domain of the SERPINA1 gene; and further may comprise (d) a template nucleic acid that comprises a full-length or partial coding sequence of SERPINA1 gene, optionally a promoter, and further optionally a polyadenylation signal.

[0070] In an embodiment, a mutation in the SERPINA1 gene is corrected, e.g., by HDR, using an exogenously provided template nucleic acid.

[0071] In an embodiment, the template nucleic acid is a single stranded nucleic acid. In another embodiment, the template nucleic acid is a double stranded nucleic acid. In an embodiment, the template nucleic acid comprises a nucleotide sequence, e.g., of one or more nucleotides, that will be added to or will template a change in the target nucleic acid. In another embodiment, the template nucleic acid comprises a nucleotide sequence that may be used to modify the target position. In another embodiment, the template nucleic acid comprises a nucleotide sequence, e.g., of one or more nucleotides, that corresponds to wild-type sequence of the target nucleic acid, e.g., of the target position.

[0072] In another embodiment, a sequence is inserted to the SERPINA1 gene, e.g., by HDR, without using an exogenously provided template nucleic acid. In an embodiment, the template nucleic acid comprises a sequence including any of Exons II, III, IV, or V. In an embodiment, the template nucleic acid comprises a sequence including Exons II, III, IV, and V. In an embodiment, the template nucleic acid comprises a sequence including Exons III, IV, and V. In an embodiment, the template nucleic acid comprises a promoter sequence. In another embodiment the template nucleic acid does not comprise a promoter sequence. In an embodiment, the template nucleic acid comprises a splice donor or acceptor. In an embodiment, the template nucleic acid includes a polyadenylation signal.

[0073] In another embodiment, a mutation in the SERPINA1 gene is corrected, e.g., by HDR, without using an exogenously provided template nucleic acid. While not wishing to be bound by theory, it is believed that an endogenous region of homology can mediate HDR-based correction. In an embodiment, alteration of the target sequence occurs by HDR with an endogenous genomic donor sequence. In an embodiment, the endogenous genomic donor sequence is located on the same chromosome as the target sequence. In another embodiment, the endogenous genomic donor sequence is located on a different chromosome from the target sequence. Mutations in the SERPINA1 gene that can be corrected (e.g., altered) by HDR with an endogenous genomic donor sequence include, e.g., a point mutation in the SERPINA1 gene that results in expression of a mutant A1AT protein comprising an amino acid mutation at E342 or E264, e.g., E342K or E264V.

[0074] As described above, a nucleic acid may comprise (a) a sequence encoding a gRNA molecule comprising a targeting domain that is complementary with a target domain in the SERPINA1 gene, and (b) a sequence encoding an RNA-guided nuclease (e.g., a Cas9 molecule).

[0075] In an embodiment, (a) and (b) are present on the same nucleic acid molecule, e.g., the same vector, e.g., the same viral vector, e.g., the same adeno-associated virus (AAV) vector. In an embodiment, the nucleic acid molecule is an AAV vector. Exemplary AAV vectors that may be used in any of the described compositions and methods include an AAV1 vector, a modified AAV1 vector, an AAV2 vector, a modified AAV2 vector, an AAV3 vector, a modified AAV3 vector, an AAV4 vector, a modified AAV4 vector, an AAV5 vector, a modified AAV5 vector, an AAV6 vector, a modified AAV6 vector, an AAV7 vector, a modified AAV7 vector, an AAV8 vector, a modified AAV8 vector, an AAV9 vector, a modified AAV9 vector, an AAV.rh10 vector, a modified AAV.rh10 vector, an AAV.rh32/33 vector, a modified AAV.rh32/33 vector, an AAV.rh64 vector, a modified AAV.rh64 vector, and a chimeric AAV vector.

[0076] In another embodiment, (a) is present on a first nucleic acid molecule, e.g., a first vector, e.g., a first viral vector, e.g., a first AAV vector; and (b) is present on a second nucleic acid molecule, e.g., a second vector, e.g., a second vector, e.g., a second AAV vector. The first and second nucleic acid molecules may be AAV vectors.

[0077] In another embodiment, the nucleic acid may further comprise (c) a sequence that encodes a second, third and/or fourth gRNA molecule as described herein. In an embodiment, the nucleic acid comprises (a), (b) and (c). Each of (a) and (c) may be present on the same nucleic acid molecule, e.g., the same vector, e.g., the same viral vector, e.g., the same adeno-associated virus (AAV) vector. In an embodiment, the nucleic acid molecule is an AAV vector.

[0078] In another embodiment, (a) and (c) are on different vectors. For example, (a) may be present on a first nucleic acid molecule, e.g., a first vector, e.g., a first viral vector, e.g., a first AAV vector, and (c) may be present on a second nucleic acid molecule, e.g., a second vector, e.g., a second vector, e.g., a second AAV vector. In an embodiment, the first and second nucleic acid molecules are AAV vectors.

[0079] In another embodiment, each of (a), (b), and (c) are present on the same nucleic acid molecule, e.g., the same vector, e.g., the same viral vector, e.g., an AAV vector. In an embodiment, the nucleic acid molecule is an AAV vector. In an alternate embodiment, one of (a), (b), and (c) is encoded on a first nucleic acid molecule, e.g., a first vector, e.g., a first viral vector, e.g., a first AAV vector; and a second and third of (a), (b), and (c) is encoded on a second nucleic acid molecule, e.g., a second vector, e.g., a second vector, e.g., a second AAV vector. The first and second nucleic acid molecule may be AAV vectors.

[0080] In an embodiment, (a) is present on a first nucleic acid molecule, e.g., a first vector, e.g., a first viral vector, a first AAV vector; and (b) and (c) are present on a second nucleic acid molecule, e.g., a second vector, e.g., a second vector, e.g., a second AAV vector. The first and second nucleic acid molecule may be AAV vectors.

[0081] In another embodiment, (b) is present on a first nucleic acid molecule, e.g., a first vector, e.g., a first viral vector, e.g., a first AAV vector, and (a) and (c) are present on a second nucleic acid molecule, e.g., a second vector, e.g., a second vector, e.g., a second AAV vector. The first and second nucleic acid molecule may be AAV vectors.

[0082] In another embodiment, (c) is present on a first nucleic acid molecule, e.g., a first vector, e.g., a first viral vector, e.g., a first AAV vector, and (b) and (a) are present on a second nucleic acid molecule, e.g., a second vector, e.g., a second vector, e.g., a second AAV vector. The first and second nucleic acid molecule may be AAV vectors.

[0083] In another embodiment, each of (a), (b) and (c) are present on different nucleic acid molecules, e.g., different vectors, e.g., different viral vectors, e.g., different AAV vector. For example, (a) may be on a first nucleic acid molecule, (b) on a second nucleic acid molecule, and (c) on a third nucleic acid molecule. The first, second and third nucleic acid molecule may be AAV vectors.

[0084] In another embodiment, when a third and/or fourth gRNA molecule are present, each of (a), (b), (c)(i), (c)(ii) and (c)(iii) may be present on the same nucleic acid molecule, e.g., the same vector, e.g., the same viral vector, e.g., an AAV vector. In an embodiment, the nucleic acid molecule is an AAV vector. In an alternate embodiment, each of (a), (b), (c)(i), (c)(ii) and (c)(iii) may be present on the different nucleic acid molecules, e.g., different vectors, e.g., the different viral vectors, e.g., different AAV vectors. In further embodiments, each of (a), (b), (c)(i), (c)(ii) and (c)(iii) may be present on more than one nucleic acid molecule, but fewer than five nucleic acid molecules, e.g., AAV vectors.

[0085] In another embodiment, when (d) a template nucleic acid is present, each of (a), (b), and (d) may be present on the same nucleic acid molecule, e.g., the same vector, e.g., the same viral vector, e.g., an AAV vector. In an embodiment, the nucleic acid molecule is an AAV vector. In an alternate embodiment, each of (a), (b), and (d) may be present on the different nucleic acid molecules, e.g., different vectors, e.g., the different viral vectors, e.g., different AAV vectors. In further embodiments, each of (a), (b), and (d) may be present on more than one nucleic acid molecule, but fewer than three nucleic acid molecules, e.g., AAV vectors.

[0086] In another embodiment, when (d) a template nucleic acid is present, each of (a), (b), (c)(i) and (d) may be present on the same nucleic acid molecule, e.g., the same vector, e.g., the same viral vector, e.g., an AAV vector. In an embodiment, the nucleic acid molecule is an AAV vector. In an alternate embodiment, each of (a), (b), (c)(i) and (d) may be present on the different nucleic acid molecules, e.g., different vectors, e.g., the different viral vectors, e.g., different AAV vectors. In further embodiments, each of (a), (b), (c)(i) and (d) may be present on more than one nucleic acid molecule, but fewer than four nucleic acid molecules, e.g., AAV vectors.

[0087] In another embodiment, when (d) a template nucleic acid is present, each of (a), (b), (c)(i), (c)(ii) and (d) may be present on the same nucleic acid molecule, e.g., the same vector, e.g., the same viral vector, e.g., an AAV vector. In an embodiment, the nucleic acid molecule is an AAV vector. In an alternate embodiment, each of (a), (b), (c)(i), (c)(ii) and (d) may be present on the different nucleic acid molecules, e.g., different vectors, e.g., the different viral vectors, e.g., different AAV vectors. In further embodiments, each of (a), (b), (c)(i), (c)(ii) and (d) may be present on more than one nucleic acid molecule, but fewer than five nucleic acid molecules, e.g., AAV vectors.

[0088] In another embodiment, when (d) a template nucleic acid is present, each of (a), (b), (c)(i), (c)(ii), (c)(iii) and (d) may be present on the same nucleic acid molecule, e.g., the same vector, e.g., the same viral vector, e.g., an AAV vector. In an embodiment, the nucleic acid molecule is an AAV vector. In an alternate embodiment, each of (a), (b), (c)(i), (c)(ii), (c)(iii) and (d) may be present on the different nucleic acid molecules, e.g., different vectors, e.g., the different viral vectors, e.g., different AAV vectors. In further embodiments, each of (a), (b), (c)(i), (c)(ii), (c)(iii) and (d) may be present on more than one nucleic acid molecule, but fewer than six nucleic acid molecules, e.g., AAV vectors.

[0089] The nucleic acids described herein may comprise a promoter operably linked to the sequence that encodes the gRNA molecule of (a), e.g., a promoter described herein. The nucleic acid may further comprise a second promoter operably linked to the sequence that encodes the second, third and/or fourth gRNA molecule of (c), e.g., a promoter described herein. The promoter and second promoter differ from one another. In an embodiment, the promoter and second promoter are the same.

[0090] The nucleic acids described herein may further comprise a promoter operably linked to the sequence that encodes the RNA-guided nuclease (e.g., a Cas9 molecule) of (b), e.g., a promoter described herein.

[0091] In another aspect, disclosed herein is a composition comprising (a) a gRNA molecule comprising a targeting domain that is complementary with a target domain in the SERPINA1 gene, as described herein. The composition of (a) may further comprise (b) an RNA-guided nuclease (e.g., Cas9 molecule) as described herein. A composition of (a) and (b) may further comprise (c) a second, third and/or fourth gRNA molecule, e.g., a second, third and/or fourth gRNA molecule described herein. A composition of (a), (b) and (c) may further comprise (d) a template nucleic acid (in an embodiment where an exogenous template is used). In an embodiment, the composition is a pharmaceutical composition. The Compositions described herein, e.g., pharmaceutical compositions described herein, can be used in treating A1AT deficiency in a subject, e.g., in accordance with a method disclosed herein.

[0092] In another embodiment, when (e) a nucleic acid comprising a full-length or partial coding sequence of SERPINA1 gene, a promoter, and a polyadenylation signal, is present, each of (a), (b), (c)(i) and (e) may be present on the same nucleic acid molecule, e.g., the same vector, e.g., the same viral vector, e.g., an AAV vector. In an embodiment, the nucleic acid molecule is an AAV vector. In an alternate embodiment, each of (a), (b), (c)(i) and (e) may be present on the different nucleic acid molecules, e.g., different vectors, e.g., the different viral vectors, e.g., different AAV vectors. In further embodiments, each of (a), (b), (c)(i) and (e) may be present on more than one nucleic acid molecule, but fewer than four nucleic acid molecules, e.g., AAV vectors.

[0093] In another aspect, disclosed herein is a method of altering a cell, e.g., altering the structure, e.g., altering the sequence, of a target nucleic acid of a cell, comprising contacting said cell with: (a) a gRNA that targets the SERPINA1 gene, e.g., a gRNA as described herein; (b) an RNA-guided nuclease (e.g., a Cas9 molecule) as described herein; and optionally, (c) a second, third and/or fourth gRNA that targets SERPINA1 gene or SERPINA1 gene, e.g., a gRNA; and optionally, (d) a template nucleic acid, as described herein.

[0094] In an embodiment, the method comprises contacting said cell with (a) and (b).

[0095] In an embodiment, the method comprises contacting said cell with (a), (b), and (c).

[0096] In an embodiment, the method comprises contacting said cell with (a), (b), (c) and (d).

[0097] In an embodiment, the gRNA targets the SERPINA1 gene and no exogenous template nucleic acid is contacted with the cell.

[0098] The targeting domain of the gRNA of (a) and optionally (c) may comprise a sequence set forth in SEQ ID NOs:253-2192, or a targeting domain comprising a sequence that differs by no more than 1, 2, 3, 4, or 5 nucleotides from a targeting domain sequence set forth in SEQ ID NOs:253-2192.

[0099] In an embodiment, the method comprises contacting a cell from a subject suffering from or likely to develop A1AT deficiency. The cell may be from a subject having a mutation at an A1AT target position in the SERPINA1 gene or a subject which would benefit from having a mutation at an A1AT target position in the SERPINA1 gene.

[0100] In an embodiment, the contacting may be performed ex vivo and the contacted cell may be returned to the subject's body after the contacting step. In another embodiment, the contacting step may be performed in vivo.

[0101] In an embodiment, the method of altering a cell as described herein comprises acquiring knowledge of the sequence at an A1AT target position in said cell, prior to the contacting step. Acquiring knowledge of the sequence at an A1AT target position in the cell may be by sequencing the SERPINA1 gene, or a portion of the SERPINA1 gene.

[0102] In an embodiment, the contacting step of the method comprises contacting the cell with a nucleic acid, e.g., a vector, e.g., an AAV vector, that expresses at least one of (a), (b), and (c). In an embodiment, the contacting step of the method comprises contacting the cell with a nucleic acid, e.g., a vector, e.g., an AAV vector, that expresses each of (a), (b), and (c). In another embodiment, the contacting step of the method comprises delivering to the cell an RNA-guided nuclease (e.g., Cas9 molecule) of (b) and a nucleic acid which encodes a gRNA (a) and optionally, a second gRNA (c)(i) (and further optionally, a third gRNA (c)(iv) and/or fourth gRNA (c)(iii).

[0103] In an embodiment, the contacting step of the method comprises contacting the cell with a nucleic acid, e.g., a vector, e.g., an AAV vector, that expresses at least one of (a), (b), (c) and (d). In an embodiment, the contacting step of the method comprises contacting the cell with a nucleic acid, e.g., a vector, e.g., an AAV vector, that expresses each of (a), (b), and (c). In another embodiment, the contacting step of the method comprises delivering to the cell an RNA-guided nuclease (e.g., Cas9 molecule) of (b), a nucleic acid which encodes a gRNA of (a) and a template nucleic acid of (d), and optionally, a second gRNA (c)(i) (and further optionally, a third gRNA (c)(iv) and/or fourth gRNA (c)(iii).

[0104] In an embodiment, contacting comprises contacting the cell with a nucleic acid, e.g., an AAV1 vector, an AAV2 vector, a modified AAV2 vector, an AAV3 vector, a modified AAV3 vector, an AAV4 vector, a modified AAV4 vector, an AAV5 vector, a modified AAV5 vector, an AAV6 vector, a modified AAV6 vector, an AAV7 vector, a modified AAV7 vector, an AAV8 vector, a modified AAV8 vector, an AAV9 vector, a modified AAV9 vector, an AAV.rh10 vector, a modified AAV.rh10 vector, an AAV.rh32/33 vector, a modified AAV.rh32/33 vector, an AAV.rh64 vector, a modified AAV.rh64 vector, and a chimeric AAV vector.

[0105] In an embodiment, contacting comprises delivering to the cell an RNA-guided nuclease (e.g., a Cas9 molecule) of (b), as a protein or an mRNA, and a nucleic acid which encodes (a) and optionally a second, third and/or fourth gRNA of (c).

[0106] In an embodiment, contacting comprises delivering to the cell an RNA-guided nuclease (e.g., a Cas9 molecule) of (b), as a protein or an mRNA, said gRNA of (a), as an RNA, and optionally said second, third and/or fourth gRNA of (c), as an RNA.

[0107] In an embodiment, contacting comprises delivering to the cell a gRNA of (a) as an RNA, optionally said second, third and/or fourth gRNA of (c) as an RNA, and a nucleic acid that encodes the RNA-guided nuclease (e.g., a Cas9 molecule) of (b).

[0108] In another aspect, disclosed herein is a method of treating or preventing a subject suffering from or likely to develop A1AT deficiency, e.g., altering the structure, e.g., sequence, of a target nucleic acid of the subject, comprising contacting the subject (or a cell from the subject) with:
[0109] (a) a gRNA that targets the SERPINA1 gene, e.g., a gRNA disclosed herein;
[0110] (b) an RNA-guided nuclease (e.g., a Cas9 molecule) disclosed herein; and optionally, (c)(i) a second gRNA that targets the SERPINA1 gene, e.g., a second gRNA disclosed herein, and
[0111] further optionally, (c)(ii) a third gRNA, and still further optionally, (c)(iii) a fourth gRNA that target the SERPINA1 gene, e.g., a third and fourth gRNA disclosed herein.

[0112] The method of treating a subject may further comprise contacting the subject (or a cell from the subject) with (d) a template nucleic acid (in an embodiment where an exogenous template is used), e.g., a template nucleic acid disclosed herein.

[0113] In an embodiment, a template nucleic acid is used when the method of treating a subject uses HDR to alter the sequence of the target nucleic acid of the subject.

[0114] In an embodiment, contacting comprises contacting with (a) and (b).

[0115] In an embodiment, contacting comprises contacting with (a), (b), and (c)(i).

[0116] In an embodiment, contacting comprises contacting with (a), (b), (c)(i) and (c)(ii).

[0117] In an embodiment, contacting comprises contacting with (a), (b), (c)(i), (c)(ii) and (c)(iii).

[0118] In an embodiment, contacting comprises contacting with (a), (b), (c)(i) and (d).

[0119] In an embodiment, contacting comprises contacting with (a), (b), (c)(i), (c)(ii) and (d).

[0120] In an embodiment, contacting comprises contacting with (a), (b), (c)(i), (c)(ii), (c)(iii) and (d).

[0121] The targeting domain of the gRNA of (a) or (c) (e.g., (c)(i), (c)(ii), or (c)(iii) may comprise a sequence set forth in SEQ ID NOs:253-2192, or a sequence that differs by no more than 1, 2, 3, 4, or 5 nucleotides from a sequence set forth in SEQ ID NOs:253-2192.

[0122] In an embodiment, the method comprises acquiring knowledge of the sequence (e.g., a mutation) of an A1AT target position in said subject.

[0123] In an embodiment, the method comprises acquiring knowledge of the sequence (e.g., a mutation) of an A1AT target position in said subject by sequencing the SERPINA1 gene or a portion of the SERPINA1 gene.

[0124] In an embodiment, the method comprises correcting a mutation at an A1AT target position in the SERPINA1 gene.

[0125] In an embodiment, the method comprises correcting a mutation at an A1AT target position in the SERPINA1 gene by HDR.

[0126] In an embodiment, the method comprises introducing a mutation at an A1AT target position in the SERPINA1 gene.

[0127] In an embodiment, the method comprises introducing a mutation at an A1AT target position in the SERPINA1 gene by NHEJ.

[0128] When the method comprises correcting the mutation at an A1AT target position by HDR, an RNA-guided nuclease (e.g., a Cas9 molecule) of (b), at least one guide RNA, e.g., a guide RNA of (a) and a template nucleic acid of (d) are included in the contacting step.

[0129] In an embodiment, a cell of the subject is contacted ex vivo with (a), (b), (d) and optionally (c)(i), further optionally (c)(ii), and still further optionally (c)(iii). In an embodiment, said cell is returned to the subject's body.

[0130] In an embodiment, a cell of the subject is contacted is in vivo with (a), (b) (d) and optionally (c)(i), further optionally (c)(ii), and still further optionally (c)(iii).

[0131] In an embodiment, the cell of the subject is contacted in vivo by intravenous delivery of (a), (b), (d) and optionally (c)(i), further optionally (c)(ii), and still further optionally (c)(iii).

[0132] In an embodiment, the cell of the subject is contacted in vivo by intramuscular delivery of (a), (b), (d) and optionally (c)(i), further optionally (c)(ii), and still further optionally (c)(iii).

[0133] In an embodiment, the cell of the subject is contacted in vivo by subcutaneous delivery of (a), (b), (d) and optionally (c)(i), further optionally (c)(ii), and still further optionally (c)(iii).

[0134] In an embodiment, the cell of the subject is contacted in vivo by intra-bone marrow (IBM) delivery of (a), (b), (d) and optionally (c)(i), further optionally (c)(ii), and still further optionally (c)(iii).

[0135] In an embodiment, contacting comprises contacting the subject with a nucleic acid, e.g., a vector, e.g., an AAV vector, described herein, e.g., a nucleic acid that encodes at least one of (a), (b), (d) and optionally (c)(i), further optionally (c)(ii), and still further optionally (c)(iii).

[0136] In an embodiment, contacting comprises delivering to said subject said RNA-guided nuclease (e.g., a Cas9 molecule) of (b), as a protein or mRNA, and a nucleic acid which encodes (a), a nucleic acid of (d) and optionally (c)(i), further optionally (c)(ii), and still further optionally (c)(iii).

[0137] In an embodiment, contacting comprises delivering to the subject the RNA-guided nuclease (e.g., a Cas9 molecule) of (b), as a protein or mRNA, the gRNA of (a), as an RNA, a nucleic acid of (d) and optionally the second, third and/or fourth gRNA of (c), as an RNA.

[0138] In an embodiment, contacting comprises delivering to the subject the gRNA of (a), as an RNA, optionally said second, third and/or fourth gRNA of (c), as an RNA, a nucleic acid that encodes the RNA-guided nuclease (e.g., a Cas9 molecule) of (b), and a nucleic acid of (d).

[0139] When the method comprises (1) introducing a mutation at an A1AT target position by NHEJ or (2) knocking down expression of the SERPINA1 gene by targeting the promoter region, an RNA-guided nuclease (e.g., a Cas9 molecule) of (b) and at least one guide RNA, e.g., a guide RNA of (a) are included in the contacting step.

[0140] In an embodiment, a cell of the subject is contacted ex vivo with (a), (b) and optionally (c)(i), further optionally (c)(ii), and still further optionally (c)(iii). In an embodiment, said cell is returned to the subject's body.

[0141] In an embodiment, a populations of cells from a subject is contacted ex vivo with (a), (b) and optionally (c) to correct the mutations in the SERPINA1 gene that result in the expression of an A1AT mutant protein comprising an amino acid mutation at E342K and/or E264V and a second population of cells from the subject is contacted ex vivo with (a), (b) and optionally (c) to introduce a mutation in the SERPINA1 gene to knockout the SERPINA1 gene. A mixture of the two cell populations may be returned to the subject's body to treat or prevent A1AT deficiency.

[0142] In an embodiment, a cell of the subject is contacted is in vivo with (a), (b) and optionally (c)(i), further optionally (c)(ii), and still further optionally (c)(iii). In an embodiment, the cell of the subject is contacted in vivo by intravenous delivery of (a), (b) and optionally (c)(i), further optionally (c)(ii), and still further optionally (c)(iii). In an embodiment, the cell of the subject is contacted in vivo by intramuscular delivery of (a), (b) and optionally (c)(i), further optionally (c)(ii), and still further optionally (c)(iii). In an embodiment, the cell of the subject is contacted in vivo by subcutaneous delivery of (a), (b) and optionally (c)(i), further optionally (c)(ii), and still further optionally (c)(iii). In an embodiment, the cell of the subject is contacted in vivo by intra-bone marrow (IBM) delivery of (a), (b) and optionally (c)(i), further optionally (c)(ii), and still further optionally (c)(iii).

[0143] In an embodiment, contacting comprises contacting the subject with a nucleic acid, e.g., a vector, e.g., an AAV vector, described herein, e.g., a nucleic acid that encodes at least one of (a), (b), and optionally (c)(i), further optionally (c)(ii), and still further optionally (c)(iii).

[0144] In an embodiment, contacting comprises delivering to said subject said RNA-guided nuclease (e.g., Cas9 molecule) of (b), as a protein or mRNA, and a nucleic acid which encodes (a) and optionally (c)(i), further optionally (c)(ii), and still further optionally (c)(iii).

[0145] In an embodiment, contacting comprises delivering to the subject the RNA-guided nuclease (e.g., a Cas9 molecule) of (b), as a protein or mRNA, the gRNA of (a), as an RNA, and optionally the second, third and/or fourth gRNA of (c), as an RNA.

[0146] In an embodiment, contacting comprises delivering to the subject the gRNA of (a), as an RNA, optionally said second, third and/or fourth gRNA of (c), as an RNA, and a nucleic acid that encodes the RNA-guided nuclease (e.g., a Cas9 molecule) of (b).

[0147] In another aspect, disclosed herein is a reaction mixture comprising a gRNA, a nucleic acid, or a composition described herein, and a cell, e.g., a cell from a subject having, or likely to develop A1AT deficiency, or a subject having a mutation at an A1AT target position in the SERPINA1 gene, or a cell from a subject which would benefit from having a mutation at an A1AT target position in the SERPINA1 gene.

[0148] In another aspect, disclosed herein is a kit comprising, (a) gRNA molecule described herein, or nucleic acid that encodes the gRNA, and one or more of the following:
[0149] (b) an RNA-guided nuclease (e.g., a Cas9 molecule) described herein, or a nucleic acid or mRNA that encodes the RNA-guided nuclease (e.g., a Cas9 molecule);
[0150] (c)(i) a second gRNA molecule, e.g., a second gRNA molecule described herein or a nucleic acid that encodes (c)(i);
[0151] (c)(ii) a third gRNA molecule, e.g., a second gRNA molecule described herein or a nucleic acid that encodes (c)(ii);
[0152] (c)(iii) a fourth gRNA molecule, e.g., a second gRNA molecule described herein or a nucleic acid that encodes (c)(iii);
[0153] (d) a template nucleic acid (in an embodiment where an exogenous template is used), e.g., a template nucleic acid described herein.

[0154] In an embodiment, the kit comprises nucleic acid, e.g., an AAV vector, that encodes one or more of (a), (b), (c)(i), (c)(ii), (c)(iii) and (d).

[0155] In an aspect, the disclosure features a gRNA molecule, referred to herein as a governing gRNA molecule, comprising a targeting domain which is complementary to a target domain on a nucleic acid that encodes a component of the CRISPR/RNA-guided nuclease system introduced into a cell or subject. In an embodiment, the governing gRNA molecule targets a nucleic acid that encodes an RNA-guided nuclease (e.g., a Cas9 molecule) or a nucleic acid that encodes a target gene gRNA molecule. In an embodiment, the governing gRNA comprises a targeting domain that is complementary to a target domain in a sequence that encodes an RNA-guided nuclease component (e.g., a Cas9 molecule) or target gene gRNA molecule. In an embodiment, the target domain is designed with, or has, minimal homology to other nucleic acid sequences in the cell, e.g., to minimize off-target cleavage. For example, the targeting domain on the governing gRNA can be selected to reduce or minimize off-target effects. In an embodiment, a target domain for a governing gRNA can be disposed in the control or coding region of an RNA-guided nuclease (e.g., a Cas9 molecule) or disposed between a control region and a transcribed region. In an embodiment, a target domain for a governing gRNA can be disposed in the control or coding region of a target gene gRNA molecule or disposed between a control region and a transcribed region for a target gene gRNA. While not wishing to be bound by theory, it is believed that altering, e.g., inactivating, a nucleic acid that encodes an RNA-guided nuclease (e.g., a Cas9 molecule) or a nucleic acid that encodes a target gene gRNA molecule can be effected by cleavage of the targeted nucleic acid sequence or by binding of an RNA-guided nuclease (e.g., a Cas9 molecule)/governing gRNA molecule complex to the targeted nucleic acid sequence.

[0156] The compositions, reaction mixtures and kits, as disclosed herein, can also include a governing gRNA molecule, e.g., a governing gRNA molecule disclosed herein.

[0157] Unless otherwise defined, all technical and scientific terms used herein have the same meaning as commonly understood by one of ordinary skill in the art to which this invention belongs. Although methods and materials similar or equivalent to those described herein can be used in the practice or testing of the present invention, suitable methods and materials are described below. All publications, patent applications, patents, and other references mentioned herein are incorporated by reference in their entirety. In addition, the materials, methods, and examples are illustrative only and not intended to be limiting.

[0158] Headings, including numeric and alphabetical headings and subheadings, are for organization and presentation and are not intended to be limiting.

[0159] Other features and advantages of the invention will be apparent from the detailed description, drawings, and from the claims.

### BRIEF DESCRIPTION OF THE DRAWINGS

[0160] FIGS. 1A-1I are representations of several exemplary gRNAs.

[0161] FIG. 1A depicts a modular gRNA molecule derived in part (or modeled on a sequence in part) from Streptococcus pyogenes (S. pyogenes) as a duplexed structure (SEQ ID NOs:39 and 40, respectively, in order of appearance);

[0162] FIG. 1B depicts a unimolecular gRNA molecule derived in part from S. pyogenes as a duplexed structure (SEQ ID NO:41);

[0163] FIG. 1C depicts a unimolecular gRNA molecule derived in part from S. pyogenes as a duplexed structure (SEQ ID NO:42);

[0164] FIG. 1D depicts a unimolecular gRNA molecule derived in part from S. pyogenes as a duplexed structure (SEQ ID NO:43);

[0165] FIG. 1E depicts a unimolecular gRNA molecule derived in part from S. pyogenes as a duplexed structure (SEQ ID NO:44);

[0166] FIG. 1F depicts a modular gRNA molecule derived in part from Streptococcus thermophilus (S. thermophilus) as a duplexed structure (SEQ ID NOs:45 and 46, respectively, in order of appearance);

[0167] FIG. 1G depicts an alignment of modular gRNA molecules of S. pyogenes and S. thermophilus (SEQ ID NOs:39, 45, 47, and 46, respectively, in order of appearance).

[0168] FIGS. 1H-1I depicts additional exemplary structures of unimolecular gRNA molecules.

[0169] FIG. 1H shows an exemplary structure of a unimolecular gRNA molecule derived in part from S. pyogenes as a duplexed structure (SEQ ID NO:42).

[0170] FIG. 1I shows an exemplary structure of a unimolecular gRNA molecule derived in part from S. aureus as a duplexed structure (SEQ ID NO:38).

[0171] FIGS. 2A-2G depict an alignment of Cas9 sequences (Chylinski 2013). The N-terminal RuvC-like domain is boxed and indicated with a “Y.” The other two RuvC-like domains are boxed and indicated with a “B.” The HNH-like domain is boxed and indicated by a “G.” Sm: S. mutans (SEQ ID NO:1); Sp: S. pyogenes (SEQ ID NO:2); St: S. thermophilus (SEQ ID NO:4); and Li: L. innocua (SEQ ID NO:5). “Motif” (SEQ ID NO:14) is a consensus sequence based on the four sequences. Residues conserved in all four sequences are indicated by single letter amino acid abbreviation; “*” indicates any amino acid found in the corresponding position of any of the four sequences; and “−” indicates absent.

[0172] FIGS. 3A-3B show an alignment of the N-terminal RuvC-like domain from the Cas9 molecules disclosed in Chylinski 2013 (SEQ ID NOs:52-95, 120-123). The last line of FIG. 3B identifies 4 highly conserved residues.

[0173] FIGS. 4A-4B show an alignment of the N-terminal RuvC-like domain from the Cas9 molecules disclosed in Chylinski 2013 with sequence outliers removed (SEQ ID NOs:52-123). The last line of FIG. 4B identifies 3 highly conserved residues.

[0174] FIGS. 5A-5C show an alignment of the HNH-like domain from the Cas9 molecules disclosed in Chylinski 2013 (SEQ ID NOs:124-198). The last line of FIG. 5C identifies conserved residues.

[0175] FIGS. 6A-6B show an alignment of the HNH-like domain from the Cas9 molecules disclosed in Chylinski 2013 with sequence outliers removed (SEQ ID NOs:124-141, 148, 149, 151-153, 162, 163, 166-174, 177-187, 194-198). The last line of FIG. 6B identifies 3 highly conserved residues.

[0176] FIG. 7 illustrates gRNA domain nomenclature using an exemplary gRNA sequence (SEQ ID NO:42).

[0177] FIGS. 8A and 8B provide schematic representations of the domain organization of S. pyogenes Cas9. FIG. 8A shows the organization of the Cas9 domains, including amino acid positions, in reference to the two lobes of Cas9 (recognition (REC) and nuclease (NUC) lobes). FIG. 8B shows the percent homology of each domain across 83 Cas9 orthologs.

[0178] FIG. 9A shows gRNA screening results on Exon II of hSERPINA1 in HEK293 cells.

[0179] FIG. 9B shows gRNA screening results on Exon II of hSERPINA1 in Hep3B cells.

[0180] FIG. 10 provides schematic representations of vectors for use in methods of Approach 2A and 2B.

[0181] FIG. 11A provides a schematic representation of vector pSS111 for use in Approach 2B.

[0182] FIG. 11B shows results for hSERPINA1 gene augmentation.

[0183] FIG. 12 illustrates the HDR-based SERPINA1 editing strategy of Approach 1A.

[0184] FIG. 13 shows gRNA screening results on Exon V in Hep3B cells.

[0185] FIGS. 14A and 14B show a comparison of various ssODN's in mediating HDR.

[0186] FIG. 15 provides schematic representations of vectors for use in methods of Approach 1A.

[0187] FIG. 16A-M provide schematic representations of various vectors used in the examples herein. (A) pSS99-1: pTR-TBG-saCas9-bGH (7308 bp). (B) pSS99-4: pTR-CMV-saCas9-bGH (7444 bp). (C) pSS111-1: pTR-CMV-hAAT-bGH (5483 bp). (D) pSS111: CMV-hAAT-bGH (4509 bp). (E) pSS112: pTR-gRNA-203-EFS comprising targeting domain of SEQ ID NO:1390 (7362 bp). (F) pSS113: pTR-gRNA-333-EFS-minpA comprising targeting domain of SEQ ID NO:1811 (7362 bp). (G) pSS114: pTR-gRNA-203-TBG-minpA comprising targeting domain of SEQ ID NO:1390 (7571 bp). (H) pSS115: pTR-gRNA-333-TBG-minpA comprising targeting domain of SEQ ID NO:1811 (7571 bp). (I) pMESO4: U6-gRNA-1889 comprising the targeting domain of SEQ ID NO:2191 (2280 bp). (J) pMES06: p-TR-gRNA1889Z-1.7kb_hom_HDR comprising the targeting domain of SEQ ID NO:706 (7018 bp). (K) pMES08: p-TR-gRNA1889Z-2kb-1.4kb_HDR comprising the targeting domain of SEQ ID NO:706 (7018 bp). (L) pSS79: p-CMVsaCas9-BGHpA (6702 bp). (M) pAF003: CMV-saCas9 (6474 bp).

[0188] FIG. 17A-17M provides sequences for various vectors used in the examples herein. (A) pSS99-1: pTR-TBG-saCas9-bGH (7308 bp). (B) pSS99-4: pTR-CMV-saCas9-bGH (7444 bp). (C) pSS111-1: pTR-CMV-hAAT-bGH (5483 bp). (D) pSS111: CMV-hAAT-bGH (4509 bp). (E) pSS112: pTR-gRNA-203-EFS comprising targeting domain of SEQ ID NO:1390 (7362 bp). (F) pSS113: pTR-gRNA-333-EFS-minpA comprising targeting domain of SEQ ID NO:1811 (7362 bp). (G) pSS114: pTR-gRNA-203-TBG-minpA comprising targeting domain of SEQ ID NO:1390 (7571 bp). (H) pSS115: pTR-gRNA-333-TBG-minpA comprising targeting domain of SEQ ID NO:1811 (7571 bp). (I) pMESO4: U6-gRNA-1889 comprising the targeting domain of SEQ ID NO:2191 (2280 bp). (J) pMES06: p-TR-gRNA1889Z-1.7kb_hom_HDR comprising the targeting domain of SEQ ID NO:706 (7018 bp). (K) pMES08: p-TR-gRNA1889Z-2kb-1.4kb_HDR comprising the targeting domain of SEQ ID NO:706 (7018 bp). (L) pSS79: p-CMVsaCas9-BGHpA (6702 bp). (M) pAF003: CMV-saCas9 (6474 bp).

[0189] FIGS. 18A-F provides schematics and data related to gene disruption and transcription modifications of hSERPINA1 by AAV8-CRISPR in PiZ transgenic mice.

[0190] FIG. 18A shows a schematic representation of the human SERPINA1 locus in PiZ patients and transgenic mice. SgRNA-203 (left arrow) and sgRNA-333 (right arrow) are shown on Exon II.

[0191] FIG. 18B shows the configurations of the four AAV8-CRISPR vectors tested in mice.

[0192] FIG. 18C shows a timeline of dosing and sample collections.

[0193] FIG. 18D shows indels measured by a T7 Endonuclease I (T7E1) Assay on hSERPINA1 loci in livers from PiZ transgenic mice at 35-day post injection.

[0194] FIG. 18E shows hSERPINA1 transcription levels relative to mouse B2M in PiZ mouse livers and the corresponding PBS-treated littermate measured by qRT-PCR.

[0195] FIG. 18F shows a representative RNAseq analysis at a DNA lesion from one PiZ mouse treated with AAV8-SS115.

[0196] FIGS. 19A-G shows the correction of the liver phenotypes in PiZ transgenic mice by knocking down hSERPINA1 transcription with AAV8-CRISPR.

[0197] FIG. 19A shows the concentration of human AAT in mouse serum measured by hAAT-specific ELISA.

[0198] FIG. 19B shows representative images of Periodic Acid-Schiff Staining after Diastase Treatment (PAS-D) staining of murine livers at 35-day post injection. Arrowheads, AAT globules. Scale bar, 100 um.

[0199] Quantitation of PAS-D staining images showing (FIG. 19C) total counts of AAT globules and (FIG. 19D) total areas of globules.

[0200] FIG. 19E shows Western blotting of soluble and insoluble hAAT in murine livers after AAV8-CRISPR treatment. Quantitation of (FIG. 19F) soluble and (FIG. 19G) insoluble AAT from Western blotting.

[0201] FIGS. 20A-D shows the correction of the Z-mutation with a dual-vector AAV8-CRISPR system in PiZ transgenic mice.

[0202] FIG. 20A shows the configuration of three AAV vectors tested in animals.

[0203] FIG. 20B shows the timeline of animal experiments.

[0204] FIG. 20C shows RNAseq measurement of hSERPINA1 expression levels relative to mouse B2M at 56 days post treatment.

[0205] FIG. 20D shows RNAseq analysis showing nucleotide substitutions introduced by AAV8-MES06 or AAV8-MES08 near the saCas9 cut site. The arrow indicated the A nucleotide responsible for the Z mutation. Dotted line, cut site.

[0206] FIGS. 21A-D shows amelioration of the liver phenotypes in mice treated by a dual-vector AAV8-CRISPR system.

[0207] FIG. 21A shows the concentrations of circulating hAAT measured by ELISA from Day-2 to Day 56.

[0208] FIG. 21B shows representative PAS-D staining images at 56-day post injection. Scale bar, 100 um. Quantifications of total counts of AAT globules (FIG. 21C) and total areas of globules in a random location on liver tissues (FIG. 21D) from PAS-D staining at three time points post injection (28, 42, and 56 days).

[0209] FIG. 22 shows PAS-D staining images of livers from PiZ mice treated by All-in-One AAV vectors targeting Exon II of hSERPINA1.

[0210] FIGS. 23A-C shows examination of liver toxicity in PiZ transgenic mice treated with AAV-CRISPR vectors. FIG. 23A shows histological analysis of livers transduced with AAV-CRISPR 35-day in PiZ transgenic mice. Liver alanine aminotransferase (ALT) levels measured by ELISA (FIG. 23B) and serum albumin levels measured by AlphaLISA (FIG. 23C) in PBS or 5e13 vg/kg of AAV-CRISPR treated PiZ transgenic mice at 35-day post injection. Data represent mean±s.e.m. There was no statistically significant differences among groups.

[0211] FIGS. 24A-24D show PAS-D staining images of livers from PiZ mice treated by a dual-AAV-CRISPR system.

[0212] FIG. 25 shows a graph illustrating different ssODN configurations relative to the Z mutation on SERPINA1 locus.

[0213] FIG. 26 shows Next Generation Sequencing (NGS) results from a comparison study of ssODNs having different configurations for introducing the Z-mutation to hSERPINA1-ExonV by HDR in wild-type Hep3B cells. Hep3B cells were nucleofected with a combination of saCas9 plasmid, PCR fragments expressing sgRNA-1889, and ssODN as indicated (i.e., ssODN_1, ssODN_2, ssODN_3, ssODN_4, ssODN_5, ssODN_6, or ssODN_7). Three days post nucleofection, genomic DNA samples were harvested and NGS was used to sequence hSERPINA1-ExonV. Indel percentage represent total insertions and deletions near the sgRNA1889 cut site (break). HDR percentage represent the frequencies of gene editing events with all intended mutations incorporated into genomic DNA. N=4, error bars represent standard error of the mean (s.e.m.). “Nickase Ctrl” means saCas9-D10A nickase was added to the sample instead of wild-type saCas9 nuclease. “No Donor Ctrl” means no ssODN was added to the sample.

### DETAILED DESCRIPTION

### Definitions

[0214] “Domain” as used herein is used to describe segments of a protein or nucleic acid. Unless otherwise indicated, a domain is not required to have any specific functional property.

[0215] Calculations of homology or sequence identity between two sequences (the terms are used interchangeably herein) are performed as follows. The sequences are aligned for optimal comparison purposes (e.g., gaps can be introduced in one or both of a first and a second amino acid or nucleic acid sequence for optimal alignment and non-homologous sequences can be disregarded for comparison purposes). The optimal alignment is determined as the best score using the GAP program in the GCG software package with a Blossum 62 scoring matrix with a gap penalty of 12, a gap extend penalty of 4, and a frame shift gap penalty of 5. The amino acid residues or nucleotides at corresponding amino acid positions or nucleotide positions are then compared. When a position in the first sequence is occupied by the same amino acid residue or nucleotide as the corresponding position in the second sequence, then the molecules are identical at that position. The percent identity between the two sequences is a function of the number of identical positions shared by the sequences.

[0216] “Polypeptide” as used herein refers to a polymer of amino acids having less than 100 amino acid residues. In certain embodiments, it has less than 50, 20, or 10 amino acid residues.

[0217] “Alt-HDR,” “alternative homology-directed repair,” or “alternative HDR” as used herein refers to the process of repairing DNA damage using a homologous nucleic acid (e.g., an endogenous homologous sequence, e.g., a sister chromatid, or an exogenous nucleic acid, e.g., a template nucleic acid). Alt-HDR is distinct from canonical HDR in that the process utilizes different pathways from canonical HDR, and can be inhibited by the canonical HDR mediators, RAD51 and BRCA2. Also, alt-HDR uses a single-stranded or nicked homologous nucleic acid for repair of the break.

[0218] “Canonical HDR” or canonical homology-directed repair as used herein refers to the process of repairing DNA damage using a homologous nucleic acid (e.g., an endogenous homologous sequence, e.g., a sister chromatid, or an exogenous nucleic acid, e.g., a template nucleic acid). Canonical HDR typically acts when there has been significant resection at the double strand break, forming at least one single stranded portion of DNA. In a normal cell, HDR typically involves a series of steps such as recognition of the break, stabilization of the break, resection, stabilization of single stranded DNA, formation of a DNA crossover intermediate, resolution of the crossover intermediate, and ligation. The process requires RAD51 and BRCA2, and the homologous nucleic acid is typically double-stranded.

[0219] Unless indicated otherwise, the term “HDR” as used herein encompasses both canonical HDR and alt-HDR.

[0220] “Non-homologous end joining” or “NHEJ” as used herein refers to ligation mediated repair and/or non-template mediated repair including canonical NHEJ (cNHEJ), alternative NHEJ (altNHEJ), microhomology-mediated end joining (MMEJ), single-strand annealing (SSA), and synthesis-dependent microhomology-mediated end joining (SD-MMEJ).

[0221] A “reference molecule” as used herein refers to a molecule to which a modified or candidate molecule is compared. For example, a reference Cas9 molecule refers to a Cas9 molecule to which a modified or candidate Cas9 molecule is compared. Likewise, a reference gRNA refers to a gRNA molecule to which a modified or candidate gRNA molecule is compared. The modified or candidate molecule may be compared to the reference molecule on the basis of sequence (e.g., the modified or candidate molecule may have X % sequence identity or homology with the reference molecule) or activity (e.g., the modified or candidate molecule may have X % of the activity of the reference molecule). For example, where the reference molecule is a Cas9 molecule, a modified or candidate molecule may be characterized as having no more than 10% of the nuclease activity of the reference Cas9 molecule. Examples of reference Cas9 molecules include naturally occurring unmodified Cas9 molecules, e.g., a naturally occurring Cas9 molecule from S. pyogenes, S. aureus, S. thermophilus, or N. meningitidis. In certain embodiments, the reference Cas9 molecule is the naturally occurring Cas9 molecule having the closest sequence identity or homology with the modified or candidate Cas9 molecule to which it is being compared. In certain embodiments, the reference Cas9 molecule is a parental molecule having a naturally occurring or known sequence on which a mutation has been made to arrive at the modified or candidate Cas9 molecule.

[0222] “Replacement” or “replaced” as used herein with reference to a modification of a molecule does not require a process limitation but merely indicates that the replacement entity is present.

[0223] “Subject” as used herein may mean human, mouse, or non-human primate. In certain embodiments, the subject is a human, and in certain of these embodiments the human is an infant, child, young adult, or adult.

[0224] “Treat,” “treating,” and “treatment” as used herein mean the treatment of a disease in a subject, e.g., in a human, including (a) inhibiting the disease, i.e., arresting or preventing its development or progression; (b) relieving the disease, i.e., causing regression of the disease state; (c) relieving or preventing one or more symptoms of the disease; and (d) curing the disease. For example, “treating” AATD may refer to, but is not limited to, curing AATD, preventing or slowing development of AATD, relieving or preventing dyspnea, chronic cough, recurrent chest infections, chronic sputum production, or chronic wheeze, alleviating aggregation of A1AT in the liver, or restoring A1AT in blood circulation to a concentration of 11 μM.

[0225] “Prevent,” “preventing,” and “prevention” as used herein means the prevention of a disease in a subject, e.g., in a human, including (a) avoiding or precluding the disease; (b) affecting the predisposition toward the disease; and (c) delaying the onset of the disease or at least one symptom of the disease.

[0226] “X” as used herein in the context of an amino acid sequence refers to any amino acid (e.g., any of the twenty natural amino acids) unless otherwise specified.

[0227] “A1AT target position” as used herein refers to an A1AT target knockout position, an A1AT target knockin position, or an A1AT target point position as defined below. In certain embodiments of the methods, compositions, and kits provided herein, an A1AT target position is in the SERPINA1 coding region, e.g., an early coding region. In other embodiments, the target position is in the SERPINA1 non-coding region. In certain embodiments, the methods provided herein target multiple A1AT target positions for alteration simultaneously or sequentially.

[0228] “Target sequence” as used herein refers to a nucleic acid sequence comprising an A1AT target position.

[0229] “A1AT target knockout position” as used herein refers to a position in the SERPINA1 gene which, when altered (e.g., by introduction of an NHEJ-mediated indel (e.g., insertion or deletion), results in reduction or elimination of expression of the gene product encoded by the SERPINA1 gene. In certain embodiments of the methods, compositions, and kits provided herein, an A1AT target knockout position is located in a SERPINA1 gene comprising one or more mutations, e.g., the S mutation and/or Z mutation.

[0230] “A1AT target knockin position” as used herein refers to a position in the SERPINA1 gene which, when altered by insertion (e.g., by introduction of an HDR-mediated insertion), results in an optimization, e.g., improvement, of an A1AT activity, e.g., by generating a sequence that encodes a protein having wild-type A1AT activity.

[0231] “A1AT target point position” as used herein refers to a position in the SERPINA1 gene, typically a single nucleotide, which, if mutated, can result in a protein having an amino acid substitution associated with A1AT deficiency. In certain embodiments, the A1AT target point position is a nucleotide or nucleotides that, when mutated, result in a substitution at E342, E264, or both in the expressed protein, e.g., an A1AT mutant protein having an E342K substitution, an E264V substitution, or both. In certain embodiments of the methods, compositions, and kits provide herein, an A1AT target point position is targeted for HDR-mediated sequence alteration in order to introduce a nucleotide or nucleotides corresponding to the wild-type nucleotide sequence.

[0232] A “Cas9 molecule” or “Cas9 polypeptide” as used herein refers to a molecule or polypeptide, respectively, that can interact with a gRNA molecule and, in concert with the gRNA molecule, localize to a site comprising a target domain and, in certain embodiments, a PAM sequence. Cas9 molecules and Cas9 polypeptides include both naturally occurring Cas9 molecules and Cas9 polypeptides and engineered, altered, or modified Cas9 molecules or Cas9 polypeptides that differ, e.g., by at least one amino acid residue, from a reference sequence, e.g., the most similar naturally occurring Cas9 molecule.

[0233] “Governing gRNA molecule” as used herein refers to a gRNA molecule that comprises a targeting domain complementary to a target domain on a nucleic acid that comprises a sequence that encodes a component of the CRISPR/RNA-guided nuclease system that is introduced into a cell or subject. A governing gRNA does not target an endogenous cell or subject sequence. In certain embodiments, a governing gRNA molecule comprises a targeting domain that is complementary with a target sequence on: (a) a nucleic acid that encodes an RNA-guided nuclease, e.g., a Cas9 molecule; (b) a nucleic acid that encodes a gRNA which comprises a targeting domain that targets the SERPINA1 or SERPINA1 gene (a target gene gRNA); or (c) on more than one nucleic acid that encodes a CRISPR/RNA-guided nuclease component, e.g., both (a) and (b). In an embodiment, a nucleic acid molecule that encodes a CRISPR/RNA-guided nuclease component, e.g., that encodes a Cas9 molecule or a target gene gRNA, comprises more than one target domain that is complementary with a governing gRNA targeting domain. While not wishing to be bound by theory, it is believed that a governing gRNA molecule complexes with a Cas9 molecule and results in Cas9 mediated inactivation of the targeted nucleic acid, e.g., by cleavage or by binding to the nucleic acid, and results in cessation or reduction of the production of a CRISPR/Cas system component. In an embodiment, the Cas9 molecule forms two complexes: a complex comprising a Cas9 molecule with a target gene gRNA, which complex will alter the SERPINA1 or SERPINA1 gene; and a complex comprising a Cas9 molecule with a governing gRNA molecule, which complex will act to prevent further production of a CRISPR/Cas system component, e.g., a Cas9 molecule or a target gene gRNA molecule. In an embodiment, a governing gRNA molecule/Cas9 molecule complex binds to or promotes cleavage of a control region sequence, e.g., a promoter, operably linked to a sequence that encodes a Cas9 molecule, a sequence that encodes a transcribed region, an exon, or an intron, for the Cas9 molecule. In an embodiment, a governing gRNA molecule/Cas9 molecule complex binds to or promotes cleavage of a control region sequence, e.g., a promoter, operably linked to a gRNA molecule, or a sequence that encodes the gRNA molecule. In an embodiment, the governing gRNA, e.g., a Cas9-targeting governing gRNA molecule, or a target gene gRNA-targeting governing gRNA molecule, limits the effect of the Cas9 molecule/target gene gRNA molecule complex-mediated gene targeting. In an embodiment, a governing gRNA places temporal, level of expression, or other limits, on activity of the Cas9 molecule/target gene gRNA molecule complex. In an embodiment, a governing gRNA reduces off-target or other unwanted activity. In an embodiment, a governing gRNA molecule inhibits, e.g., entirely or substantially entirely inhibits, the production of a component of the Cas9 system and thereby limits, or governs, its activity.

### Alpha-1-Antitrypsin (A1AT) Deficiency

[0234] Alpha-1-antitrypsin (A1AT) deficiency is a genetic disease caused by defects in the SERPINA1 gene (also known as PI; A1A; AAT; PI1; A1AT; PRO2275; and alpha1AT). The nucleotide sequence of the SERPINA1 locus is set forth in SEQ ID NO:2231. The coding sequence of SERPINA1 is set forth in SEQ ID NO:251, and the amino acid sequence of the encoded A1AT protein product is set forth in SEQ ID NO:252.

[0235] In the United States, the prevalence of A1AT deficiency is between 1 in 5,000 and 1 in 7,000. A1AT deficiency is one of the most common genetic diseases in subjects of Northern European descent. Severe A1AT deficiency causes emphysema, with subjects developing emphysema in their third or fourth decade. A1AT deficiency can also cause liver failure and hepatocellular carcinoma, with up to 30% of subjects with severe A1AT deficiency developing significant liver disease, including cirrhosis, fulminant liver failure, and hepatocellular carcinoma.

[0236] There are two predominant mutations in the SERPINA1 gene that cause A1AT deficiency. These missense mutations affect protein conformation and secretion leading to reduced circulating levels of A1AT. The more common and more severe mutation is a glutamate to lysine substitution at amino acid position 342 (E342K, “Z mutation”) of the mature A1AT protein, which can arise from, e.g., c.1024G>A (NT 13990 in SEQ ID NO:2231). Alleles carrying the Z mutation are identified as PiZ alleles. Subjects homozygous for the PiZ allele are termed PiZZ carriers, and express 10-15% of normal levels of serum A1AT. Approximately 95% of subjects who are symptomatic for A1AT deficiency have the PiZZ genotype. Subjects heterozygous for the Z mutation are termed PiMZ mutants, and express 60% of normal levels of serum A1AT. The other predominant mutation is a glutamate to valine substitution at position 264 (E264V, “S mutation”) of the mature A1AT protein, which can arise from, e.g., c.791A>T (NT 11675 in SEQ ID NO:2231). Alleles with the S mutation are termed PiS. Subjects homozygous for the PiS allele are termed PiSS carriers, and express 60% of normal levels of serum A1AT. Subjects heterozygous for this mutation are termed PiMS and express 80% of normal levels of serum A1AT. Compound heterozygotes are represented as PiSZ. PiSZ subjects express 40% of normal levels of serum A1AT. Normal SERPINA1 subjects are represented as PiMM.

[0237] Between 30,000 and 50,000 individuals in the United States have the PiZZ genotype. The prevalence of any one of the five genotypic classes of A1AT mutations (PiZZ, PiMZ, PiSS, PiMS, and PiSZ) is approximately 1 in 5,000-7,000 in the United States. The prevalence is higher in Northern Europe, and may be as high as 1 in 1,500-3,000 in the Scandinavian population.

[0238] The pathophysiology of A1AT deficiency varies by the organ affected. Liver disease is due to a gain-of-function mechanism. Abnormally folded A1AT, especially Z-type A1AT (Z-AT), aggregates and polymerizes within hepatocytes. A1AT inclusions are found in PiZZ subjects and are thought to cause cirrhosis and, in some cases, hepatocellular carcinoma. Evidence for the gain-of-function mechanism in liver disease is supported by null homozygotes. These subjects produce no A1AT and do not develop hepatocyte inclusions or liver disease. Lung disease has been classically thought to be due to a loss-of-function mechanism: lower A1AT levels lead to unchecked activity of neutrophil elastase and subsequent alveolar destruction (Gadek et al. in The Metabolic Basis of Inherited Disease 1450-1457 (1982)). There is recent evidence that lung disease is also due in part to a gain-of-function mechanism. Z-type A1AT has been identified within the lung parenchyma and has been shown to be a neutrophil chemoattractant (Mulgrew 2004). Z-AAT may contribute through a toxic gain-of-function mechanism to inflammation and destruction of the lung parenchyma in A1AT deficiency (Alam 2014; Mornex 1986).

[0239] Less common manifestations of A1AT deficiency include membranoproliferative glomerular nephritis, rheumatoid arthritis, vascular disease including bleeding disorders, panniculitis, uveitis, and vasculitis.

[0240] A1AT deficiency leads to lung disease due to reduced inhibition of neutrophil elastase in the lung. A1AT enters the lung interstitium and alveolar lining fluid via passive diffusion from the plasma. Unchecked elastase activity in alveolae leads to destruction of the lung parenchyma. The primary manifestation of disease is emphysema with severe airflow obstruction. Subjects may also develop chronic bronchitis, bronchiectasis and asthma. Between 85 and 100% of subjects with the PiZZ genotype develop lung disease in their fourth or fifth decade. Other genotypes have a lower likelihood of developing lung disease and generally develop disease in their fifth decade or later. Smoking dramatically alters the phenotype in all A1AT deficient subjects. Smokers are more likely to develop disease and to experience earlier onset (generally 20 years earlier) and more severe disease. Lung disease in A1AT deficiency may additionally be due to monocyte and macrophage derived pathogenic Z-protein. Misfolded A1AT in PiZZ or PiSZ mutants is expressed by macrophages and has been demonstrated to be pro-inflammatory (Mulgrew 2004). The more severe lung phenotype of PiZZ and PiSZ genotypes may be due to the secretion of an altered protein in lung tissue by macrophages and monocytes (Alam 2014; Mornex 1986).

[0241] Lung disease associated with A1AT deficiency is currently treated with intravenous administration of human-derived replacement A1AT protein (Prolastin, Zemaira, or Aralast). The target A1AT blood level in plasma is greater than or equal to 570 micrograms per milliliter, which generally corresponds to a dose of 60 mg/kg weekly. A1AT replacement therapy can be used for the prevention of lung disease prior to definitive clinical demonstration of efficacy in delaying the onset and/or progression of disease, e.g., to reduce loss in lung density. Other treatment methods currently in use include, but are not limited to, bronchodilators, antibiotics to treat respiratory infections, and vaccination against pneumococcus and influenza. Inhaled corticosteroids and long-acting bronchodilators are also used in subjects with asthmatic symptoms or airflow obstruction. A treatment that prevents the progression of lung disease in A1AT deficiency without the need for monthly injections would be superior to the current standard of care. The inability of A1AT replacement therapy to fully prevent the development of lung disease may be due to the fact that replacement therapy does not eliminate the mutant Z-protein from being expressed by circulating monocytes and macrophages. Thus, a treatment that prevents damage to lung tissue that may occur due to the expression of the Z allele by circulating monocytes and macrophages would also be superior to the current standard of care.

[0242] A1AT deficiency leads to liver disease in up to 50% of A1AT subjects and leads to severe liver disease in up to 30% of subjects. Liver disease may manifest as: (a) cirrhosis during childhood that is self-limiting, (b) severe cirrhosis during childhood or adulthood that requires liver transplantation or leads to death and (c) hepatocellular carcinoma that is often deadly. The onset of liver disease is bi-modal, predominantly affecting children or adults. Childhood disease is self-limiting in many cases but may be lead to end-stage, deadly cirrhosis. Up to 18% of subjects with the PiZZ genotype may develop clinically significant liver abnormalities during childhood. Approximately 2% of PiZZ subjects develop severe liver cirrhosis leading to death during childhood (Sveger 1988; Volpert 2000). Adult-onset liver disease may affect subjects with all genotypes, but presents earlier in subjects with the PiZZ genotype. Approximately 2-10% of A1AT deficient subjects develop adult-onset liver disease.

[0243] Screening for hepatocellular carcinoma (HCC) includes, e.g., serial hepatic ultrasounds to monitor for the appearance liver nodules. Subjects who develop hepatocellular carcinoma can be treated with chemotherapy and surgery. Subjects who develop liver failure can be treated with a liver transplant. The development of liver disease in A1AT deficiency may be fatal in a large proportion of subjects: in one study, 40% of adult-onset liver disease subjects survived less than 2 years. A treatment that prevents the development of cirrhosis, liver failure, and hepatocellular carcinoma in subjects with A1AT deficiency would be vastly superior to the current standard of care.

[0244] Other potential therapies for treating A1AT deficiency include, but are not limited to, antisense oligonucleotide and RNA interference (RNAi), both of which aim to knock down the expression of Z protein. In animal models, RNAi has demonstrated sustained (weeks to months) knock-down of Z protein in PiZZ mutants. This approach requires repeated administration (monthly or every few months) of RNAi, often delivered via viral vector, for the lifetime of the subject in order to sustain knock down of the mutant Z protein. Repeated delivery of RNA to the liver with or without viral vector administration is associated with significant liver toxicity.

### Overview

[0245] Provided herein are methods for treating or preventing A1AT deficiency, including A1AT deficiency caused by an E342K substitution (“Z mutation”), e.g., c.1024G>A in the SERPINA1 gene, or an E264V substitution (“S mutation”), e.g., c.791A>T in the SERPINA1 gene. These methods utilize CRISPR/Cas-mediated genome editing to alter (e.g., correct, knockin, or knockout) one or more target positions in the SERPINA1 gene. Also provided herein are compositions and kits for use in these methods. A1AT deficiency is associated with a variety of conditions, including lung diseases such as emphysema and liver diseases such as cirrhosis, liver failure, and hepatocellular carcinoma. Accordingly, further provided herein are methods, compositions, and kits for treating or preventing diseases of the lung (e.g., disorders that affect lung epithelium and/or lung parenchyma) and liver (e.g., disorders that affect hepatocytes), as well as diseases of monocytes and macrophages.

[0246] While not wishing to be bound by theory, it is believed that alteration of SERPINA1 in one or more of hepatocytes, lung epithelial cells, mononuclear phagocytes, alveolar macrophages, and myeloid precursor cells can prevent the progression of liver and lung disease in subjects with A1AT deficiency by reducing or eliminating production of the toxic Z protein (Z-AAT) or other AAT mutant proteins (e.g., S-AAT) in subjects with PiZZ, PiSZ, or other mutant A1AT alleles. Z protein misfolds within hepatocytes, lung epithelial cells, mononuclear phagocytes, alveolar macrophages, and myeloid precursor cells and the misfolded protein becomes trapped in the endoplasmic reticulum (ER), leading to ER stress and cell death via apoptosis. The presence of Z protein creates inflammation and a pro-inflammatory state in the liver and lung. In certain embodiments of the methods disclosed herein, Z protein production is eliminated or reduced by knocking out a mutant SERPINA1. In other embodiments, Z protein production is eliminated or reduced by correcting a SERPINA1 mutation or knocking in a corrected SERPINA1 sequence, resulting in production of wild-type A1AT (e.g., lung-protective A1AT). In certain embodiments, cells comprising a corrected or knocked-in SERPINA1 sequence do not undergo apoptosis, and in certain embodiments the altered cell does not cause inflammation. In certain embodiments, the disease is cured, does not progress, or has delayed progression compared to a subject who has not received the therapy.

[0247] In certain embodiments, the method described herein result in a selective advantage to survival of one or more of treated hepatocytes, lung epithelium, mononuclear phagocytes, alveolar macrophages, or myeloid precursor cells. In certain embodiments, the target cell is modified and has a SERPINA1 knockout or correction. Cells with a SERPINA1 knockout or correction do not produce toxic Z protein. Diseased cells that are not modified produce toxic Z protein and may undergo apoptosis secondary to endoplasmic reticulum (ER) stress induced by Z protein misfolding. Thus, in certain embodiments, after treatment using the methods described herein, treated cells survive, while untreated cells die. This selective advantage can drive eventual colonization in hepatocytes with 100% SERPINA1 corrected or knocked out cells. This selective advantage can also drive eventual colonization in lung epithelium, mononuclear phagocytes, alveolar macrophages and/or myeloid precursor cells with 100% SERPINA1 corrected or knocked out cells.

### Approach 1A

[0248] In certain embodiments, methods are provided herein for treating or preventing A1AT deficiency in a PiZZ, PiSZ, or PiMZ subject, or any other subject with an A1AT mutation, using a CRISPR/RNA-guided nuclease (e.g., Cas9) system to knockin the correct nucleotide at or near a mutation in Exon V of the SERPINA1 gene (e.g., the Z mutation) using homology directed repair (HDR). These embodiments are referred to herein as “Approach 1A.”

[0249] In certain embodiments, methods of Approach 1A comprise delivery of one or more (e.g., two, three, or four) gRNA molecules, an RNA-guided nuclease (e.g., a Cas9 molecule), and an HDR donor template, and in certain of these embodiments one or more of these components are delivered using one or more AAV vectors, nanoparticles, or a combination thereof. In certain embodiments, the donor template for HDR comprises a sequence including any or all of Exons II, III, IV, or V, or any or all of Exons III, IV, and V. In certain of these embodiments, the donor template further comprises a sequence comprising all or part of one or more intronic sequences between these exons. In certain embodiments, the donor template comprises a promoter sequence, while in other embodiments the template does not comprise a promoter. In certain embodiments, the donor template comprises a splice donor or acceptor. In certain embodiments, the donor template includes a polyadenylation signal.

[0250] In certain embodiments, one or more breaks (e.g., one or more single strand or double strand breaks) are introduced (e.g., positioned by one or more gRNA molecules) within 200 base pairs (bp) upstream and/or 200 bp downstream of one or more nucleotide mutations in the SERPINA1 gene (e.g., c.1024G>A), which results in expression of an A1AT mutant protein comprising an amino acid mutation at E342K. In certain embodiments, one or more of these breaks are in Exon V or in an intron adjacent to Exon V (either 5′ or 3′ of Exon V). In certain of these embodiments, one break is in Exon V and another break is in an intron adjacent to Exon V (either 5′ or 3′ of Exon V). In other embodiments, one break is in an intron 5′ of Exon V and another break is in an intron 3′ of Exon V. In certain embodiments, altering the A1AT target position results in HDR of genomic sequence including the mutation (e.g., c.1024G>A, resulting in expression of an A1AT mutant protein comprising amino acid mutation E342K), e.g., by a donor template sequence having a wild-type residue at the mutated position. In certain embodiments, this approach leads to cessation of production of Z-AAT and increased production of wild-type A1AT (M-AAT).

[0251] Methods of Approach 1A can prevent the development or progression of liver disease in a subject due to cessation of Z-AAT production. This approach can also prevent the progression of lung disease by restoring the production of protective M-AAT. This approach may cure or prevent the progression of both liver and lung disease.

### Approach 1B

[0252] In certain embodiments, methods are provided herein for treating or preventing A1AT deficiency in a PiZZ, PiSZ, or PiMZ subject, or any other subject with an A1AT mutation, using a CRISPR/RNA-guided nuclease (e.g., Cas9) system to knockout the Z allele by targeting Exon IV or V of the SERPINA1 gene. These embodiments are referred to herein as “Approach 1B.”

[0253] In certain embodiments, methods of Approach 1B comprise delivery of one or more (e.g., two, three, or four) gRNA molecules and an RNA-guided nuclease (e.g., a Cas9 molecule), and in certain of these embodiments one or more of these components are delivered using one or more nanoparticles, AAV vectors, or a combination thereof.

[0254] In certain embodiments, one or more breaks (e.g., one or more double-strand breaks, one single-strand break, or a pair of single-strand breaks) are introduced (e.g., positioned by one or more gRNA molecules) at or in close proximity to an A1AT target position. In certain of these embodiments, the A1AT target position is within the coding sequence of Exon IV or V in the SERPINA1 gene. In certain embodiments, altering the A1AT target position results in deletion or insertion (e.g., mediated by NHEJ) at the A1AT target position (e.g., in Exon IV or V). In certain embodiments, this approach leads to cessation of production of Z-AAT.

[0255] Methods of Approach 1B provided herein can prevent the development or progression of liver disease in a subject due to cessation of Z-AAT production. This approach can also prevent the progression of at least some portion of lung disease in a subject.

### Approach 2A

[0256] In certain embodiments, methods are provided herein for treating or preventing A1AT deficiency in a PiZZ, PiZnull (one PiZ allele, other allele missing), PiSZ, PiMZ, PiMS, or PiSS subject, or in any other subject with an A1AT mutation, using a CRISPR/RNA-guided nuclease (e.g., Cas9) system targeting an early coding region of SERPINA1 to knockout the Z allele, S allele, or other mutant A1AT alleles. These embodiments are referred to herein as “Approach 2A.”

[0257] In certain embodiments, methods of Approach 2A comprise delivery of one or more (e.g., two, three, or four) gRNA molecules and an RNA-guided nuclease (e.g., a Cas9 molecule), and in certain of these embodiments one or more of these components are delivered using one or more nanoparticles, AAV vectors, or a combination thereof.

[0258] In certain embodiments, one or more breaks (e.g., one or more single strand or double strand breaks) are introduced (e.g., positioned by one or more gRNA molecules) at or in close proximity to an A1AT target position. In certain of these embodiments, the A1AT target position is at or near the start codon within Exon II in the SERPINA1 gene. In certain embodiments, altering the A1AT target position results in deletion or insertion (e.g., mediated by NHEJ) at the A1AT target position (e.g., Exon II, e.g., the start codon). In certain embodiments, this approach gives rise to the loss or destruction of the Z mutation, S mutation, or any mutation of the SERPINA1 gene. In certain embodiments, this approach leads to cessation of production of Z-AAT, S-AAT, or any mutant AAT in a cell comprising the modification.

[0259] Methods of Approach 2A provided herein can prevent the development or progression of liver disease in a subject due to the cessation of production of Z-AAT, S-AAT, or other mutant AAT protein. These methods can also prevent the progression of at least some portion of lung disease in a subject.

### Approach 2B

[0260] In certain embodiments, methods are provided herein for treating or preventing A1AT deficiency in a PiZZ, PiZnull, PiSZ, PiMZ, PiMS, or PiSS subject, or any other subject with an A1AT mutation, using a CRISPR/RNA-guided nuclease (e.g., Cas9) system targeting the early coding region of SERPINA1 gene to knockout the Z allele, S allele, or other mutant SERPINA1 alleles in combination with expression of exogenous functional A1AT via delivery of a cDNA encoding A1AT driven by a constitutive or liver-specific promoter. These embodiments are referred to herein as “Approach 2B.”

[0261] In certain embodiments, methods of Approach 2B comprise delivery of one or more (e.g., two, three, or four) gRNA molecules and an RNA-guided nuclease (e.g., a Cas9 molecule), and in certain of these embodiments one or more of these components are delivered using one or more nanoparticles, AAV vectors, or a combination thereof.

[0262] In certain embodiments, one or more breaks (e.g., one or more single strand or double strand breaks) are introduced (e.g., positioned by one or more gRNA molecules) at or in close proximity to an A1AT target position. In certain of these embodiments, the A1AT target position is at or near the start codon within Exon II in the SERPINA1 gene. In certain embodiments, altering the A1AT target position results in deletion or insertion (e.g., mediated by NHEJ) at the A1AT target position (e.g., Exon II, e.g., the start codon). In certain embodiments, this approach gives rise to the loss or destruction of the Z mutation, S mutation, or any mutation of the SERPINA1 gene. In certain embodiments, this approach leads to cessation of production of Z-AAT, S-AAT, or any mutant AAT in cells comprising the modification.

[0263] In certain embodiments, delivery of a cDNA coding for the SERPINA1 gene driven by a constitutive or liver-specific promoter leads to transcription of the donor SERPINA1 cDNA and translation of wild-type A1AT (M-AAT).

[0264] Methods of Approach 2B provided herein can prevent the development or progression of liver disease in a subject due to the cessation of production of Z-AAT, S-AAT, or other mutant AAT protein. These methods can also prevent the development or progression of lung disease in a subject due to the production of M-AAT. M-AAT levels can be maintained at endogenous levels, e.g., when they are driven by a liver-specific promoter.

[0265] The embodiments described herein may be used in all classes of vertebrates including, but not limited to, primates, mice, rats, rabbits, pigs, dogs, and cats.

### Timing and Subject Selection

[0266] In certain embodiments of the methods provided herein, alteration of the SERPINA1 gene is initiated prior to disease onset, e.g., prior to developing symptoms or signs of lung or liver disease. In other embodiments, alteration of the SERPINA1 gene may be initiated after disease onset. In certain of these embodiments, alteration of the SERPINA1 gene is initiated in an early stage of disease, e.g., when a subject has tested positive for A1AT deficiency but has no signs or symptoms associated with A1AT deficiency. In other embodiments, alteration of the SERPINA1 gene is initiated after onset of A1AT deficiency. In certain of these embodiments, alteration of the SERPINA1 gene is initiated early in the course of disease progression (e.g., prior to the development of emphysema, cirrhosis, liver failure, and/or hepatocellular carcinoma), and in certain of these embodiments alteration of the SERPINA1 gene prevents or slows further progression of disease. In other embodiments, alteration of the SERPINA1 gene is initiated at an advanced stage of disease, and in certain of these embodiments alteration of the SERPINA1 gene slows, for example, progression of cirrhosis, progression of liver failure, or progression of decline in a lung function test (e.g., FEV1). Overall, initiation of treatment for a subject at all stages of disease is expected to prevent or reduce disease progression and benefit a subject.

[0267] In certain embodiments of the methods provided herein, alteration of the SERPINA1 gene is initiated in a subject who has undergone genetic testing which found a mutation in the SERPINA1 gene, e.g., a mutation described herein. In certain of these embodiments, alteration of the SERPINA1 gene is initiated in a subject who has been found to or was previously known to carry the PiZZ, PiSZ, PiSS, PiMZ, or PiMS allele, or another mutant A1AT allele. In certain embodiments, the methods provided herein comprise performing genetic testing on a subject, and initiating treatment if the subject is found to possess one or more mutations of the SERPINA1 gene.

[0268] In certain embodiments of the methods provided herein, alteration of the SERPINA1 gene is initiated in a subject who has exhibited an A1AT deficiency as demonstrated by, for example, low serum A1AT concentration and/or isoelectric focusing. In certain embodiments, the methods provided herein comprise testing a subject for A1AT deficiency, and initiating treatment if the subject exhibits A1AT deficiency.

[0269] In certain embodiments of the methods provided herein, alteration of the SERPINA1 gene is initiated in a subject with a family history of A1AT deficiency who demonstrates one or more symptoms or signs of the disease and/or has been found to have a mutation in the SERPINA1 gene. In certain of these embodiments, the methods comprise initiating treatment at the appearance of a reduced FEV1. In other embodiments, alteration of the SERPINA1 gene is initiated at the appearance of any of the following symptoms consistent or associated with A1AT deficiency: dyspnea, chronic cough, recurrent chest infections, chronic sputum production, or chronic wheeze.

[0270] In certain embodiments of the methods provided herein, alteration of the SERPINA1 gene is initiated at the appearance of any of the following findings consistent or associated with A1AT deficiency: decline in FEV1, emphysema, chronic obstructive pulmonary disease (COPD), asthma with airflow obstruction, necrotising panniculitis, elevation of transaminases or liver enzymes in liver function tests, cirrhosis, nodules found on hepatic ultrasound, hepatocellular carcinoma; CT, MRI or X-ray findings consistent with COPD including loss of lung density and/or emphysema; or CT findings of hepatic nodules or hepatocellular inclusions on liver biopsy.

[0271] In certain embodiments, the methods disclosed herein are performed on a one-time basis. In other embodiments, the methods utilize multi-dose therapy.

[0272] In certain embodiments, the SERPINA1 knockout methods described herein comprise introduction of one or more breaks near the early coding region in at least one allele of the SERPINA1 gene.

### Repairing Mutation(s) in the SERPINA1 Gene

[0273] In certain embodiments, the methods provided herein (see, e.g., Approach 1A) comprise repairing (i.e., correcting) one or more mutations in the SERPINA1 gene, e.g., by HDR, using the CRISPR/RNA-guided nuclease (e.g., Cas9) system. In these methods, mutant SERPINA1 allele(s) are corrected and restored to wild-type state. While not wishing to be bound by theory, it is believed that correction of a mutation described herein in the SERPINA1 gene restores wild-type A1AT production. The method described herein can be performed in all cell types, e.g., a cell type described herein.

[0274] In certain embodiments, one SERPINA1 allele is repaired in the subject. In another embodiment, both SERPINA1 alleles are repaired in the subject. In either situation, the subject can be cured of disease. As the disease only displays a phenotype when both alleles are mutated, repair of a single allele is adequate for a cure.

[0275] In one aspect, methods and compositions discussed herein, provide for the correction of the underlying genetic cause of A1AT deficiency, e.g., the correction of a mutation at a target position in the SERPINA1 gene, e.g., correction of a mutation described herein in the SERPINA1 gene.

[0276] In certain embodiments, the method provides for the correction of a mutation at a target position in the SERPINA1 gene, e.g., correction of a mutation described herein in the SERPINA1 gene. As described herein, in one embodiment, the method comprises the introduction of one or more breaks (e.g., single strand breaks or double strand breaks) sufficiently close to (e.g., either 5′ or 3′ to) the target position in the SERPINA1 gene, e.g., one or more nucleotide mutations in the SERPINA1 gene (e.g., a mutation at c.1024 or c.791 in the SERPINA1 gene), which results in expression of an A1AT mutant protein comprising E342K or E264V.

[0277] In certain embodiments, the targeting domain of the gRNA molecule is configured to provide a cleavage event, e.g., a double strand break or a single strand break, sufficiently close to (e.g., either 5′ or 3′ to) the target position in the SERPINA1 gene, e.g., one or more nucleotide mutations in the SERPINA1 gene (e.g., a mutation at c.1024 or c.791 in the SERPINA1 gene), which results in expression of an A1AT mutant protein comprising E342K or E264V, to allow correction, e.g., an alteration in the SERPINA1 gene, e.g., an alteration associated with HDR. In certain embodiments, the targeting domain is configured such that a cleavage event, e.g., a double strand or single strand break, is positioned within 1, 2, 3, 4, 5, 10, 15, 20, 25, 30, 35, 40, 45, 50, 60, 70, 80, 90, 100, 150, 200, 250, 300, 350, 400, 450, or 500 nucleotides of the target position in the SERPINA1 gene, e.g., one or more nucleotide mutations in the SERPINA1 gene (e.g., a mutation at c.1024 or c.791 in the SERPINA1 gene), which results in expression of an A1AT mutant protein comprising E342K or E264V. The break, e.g., a double strand or single strand break, can be positioned upstream or downstream of the target position in the SERPINA1 gene, e.g., one or more nucleotide mutations in the SERPINA1 gene (e.g., a mutation at c.1024 or c.791 in the SERPINA1 gene), which results in expression of an A1AT mutant protein comprising E342K or E264V. In certain embodiments, the break is positioned upstream or downstream of the target position in the SERPINA1 gene, e.g., in Exon V or an intron adjacent to Exon V (e.g., either 5′ or 3′ of Exon V).

[0278] In certain embodiments, a second, third and/or fourth gRNA molecule is configured to provide a cleavage event, e.g., a double strand break or a single strand break, sufficiently close to (e.g., either 5′ or 3′ to) the target position in the SERPINA1 gene, e.g., one or more nucleotide mutations in the SERPINA1 gene (e.g., a mutation at c.1024 or c.791 in the SERPINA1 gene), which results in expression of an A1AT mutant protein comprising E342K or E264V, to allow correction, e.g., an alteration associated with HDR in the SERPINA1 gene. In certain embodiments, the targeting domain is configured such that a cleavage event, e.g., a double strand or single strand break, is positioned within 1, 2, 3, 4, 5, 10, 15, 20, 25, 30, 35, 40, 45, 50, 60, 70, 80, 90, 100, 150, 200, 250, 300, 350, 400, 450, or 500 nucleotides of the target position in the SERPINA1 gene, e.g., one or more nucleotide mutations in the SERPINA1 gene (e.g., a mutation at c.1024 or c.791 in the SERPINA1 gene), which results in expression of an A1AT mutant protein comprising E342K or E264V. The break, e.g., a double strand or single strand break, can be positioned upstream or downstream of the target position in the SERPINA1 gene, e.g., one or more nucleotide mutations in the SERPINA1 gene (e.g., a mutation at c.1024 or c.791 in the SERPINA1 gene), which results in expression of an A1AT mutant protein comprising E342K or E264V. In certain embodiments, the break is positioned upstream or downstream of the target position in the SERPINA1 gene, e.g., in Exon V or an intron adjacent to Exon V (e.g., either 5′ or 3′ of Exon V).

[0279] In certain embodiments, a single strand break is accompanied by an additional single strand break, positioned by a second, third and/or fourth gRNA molecule, as discussed below. For example, the targeting domains bind configured such that a cleavage event, e.g., the two single strand breaks, are positioned within 1, 2, 3, 4, 5, 10, 15, 20, 25, 30, 35, 40, 45, 50, 60, 70, 80, 90, 100, 150, 200, 250, 300, 350, 400, 450 or 500 nucleotides of the target position in the SERPINA1 gene, e.g., one or more nucleotide mutations in the SERPINA1 gene (e.g., a mutation at c.1024 or c.791 in the SERPINA1 gene), which results in expression of an A1AT mutant protein comprising E342K or E264V. In certain embodiments, the first and second gRNA molecules are configured such that, when guiding a Cas9 nickase, a single strand break will be accompanied by an additional single strand break, positioned by a second gRNA, sufficiently close to one another to result in an alteration of the target position in the SERPINA1 gene, e.g., one or more nucleotide mutations in the SERPINA1 gene (e.g., a mutation at c.1024 or c.791 in the SERPINA1 gene), which results in expression of an A1AT mutant protein comprising E342K or E264V. In certain embodiments, the first and second gRNA molecules are configured such that a single strand break positioned by said second gRNA is within 10, 20, 30, 40, 50, 100, 200, 300, 400, 500, 600, 700, 800, 900, or 1000 nucleotides of the break positioned by said first gRNA molecule, e.g., when the Cas9 is a nickase. In certain embodiments, the two gRNA molecules are configured to position cuts at the same position, or within a few nucleotides of one another, on different strands, e.g., essentially mimicking a double strand break. In certain embodiments, the break is positioned upstream or downstream of the target position in the SERPINA1 gene, e.g., in Exon V or an intron adjacent to Exon V (e.g., either 5′ or 3′ of Exon V).

[0280] In certain embodiments, a double strand break can be accompanied by an additional double strand break, positioned by a second, third and/or fourth gRNA molecule, as is discussed below. For example, the targeting domain of a first gRNA molecule is configured such that a double strand break is positioned upstream of the target position in the SERPINA1 gene, e.g., one or more nucleotide mutations in the SERPINA1 gene (e.g., a mutation at c.1024 or c.791 in the SERPINA1 gene), which results in expression of an A1AT mutant protein comprising E342K or E264V, e.g., within 1, 2, 3, 4, 5, 10, 15, 20, 25, 30, 35, 40, 45, 50, 60, 70, 80, 90, 100, 150, 200, 250, 300, 350, 400, 450, or 500 nucleotides of the target position; and the targeting domain of a second gRNA molecule is configured such that a double strand break is positioned downstream the target position in the SERPINA1 gene, e.g., one or more nucleotide mutations in the SERPINA1 gene (e.g., a mutation at c.1024 or c.791 in the SERPINA1 gene), which results in expression of an A1AT mutant protein comprising E342K or E264V, e.g., within 1, 2, 3, 4, 5, 10, 15, 20, 25, 30, 35, 40, 45, 50, 60, 70, 80, 90, 100, 150, 200, 250, 300, 350, 400, 450, or 500 nucleotides of the target position. In certain embodiments, the break is positioned upstream or downstream of the target position in the SERPINA1 gene, e.g., in Exon V or an intron adjacent to Exon V (e.g., either 5′ or 3′ of Exon V).

[0281] In certain embodiments, a double strand break can be accompanied by two additional single strand breaks, positioned by a second gRNA molecule and a third gRNA molecule. For example, the targeting domain of a first gRNA molecule is configured such that a double strand break is positioned upstream of the target position in the SERPINA1 gene, e.g., one or more nucleotide mutations in the SERPINA1 gene (e.g., a mutation at c.1024 or c.791 in the SERPINA1 gene), which results in expression of an A1AT mutant protein comprising E342K or E264V, e.g., within 1, 2, 3, 4, 5, 10, 15, 20, 25, 30, 35, 40, 45, 50, 60, 70, 80, 90, 100, 150, 200, 250, 300, 350, 400, 450 or 500 nucleotides of the target position; and the targeting domains of a second and third gRNA molecule are configured such that two single strand breaks are positioned downstream of the target position in the SERPINA1 gene, e.g., one or more nucleotide mutations in the SERPINA1 gene (e.g., a mutation at c.1024 or c.791 in the SERPINA1 gene), which results in expression of an A1AT mutant protein comprising E342K or E264V, e.g., within 1, 2, 3, 4, 5, 10, 15, 20, 25, 30, 35, 40, 45, 50, 60, 70, 80, 90, 100, 150, 200, 250, 300, 350, 400, 450, or 500 nucleotides of the target position. In certain embodiments, the targeting domain of the first, second and third gRNA molecules are configured such that a cleavage event, e.g., a double strand or single strand break, is positioned, independently for each of the gRNA molecules. In certain embodiments, the break is positioned upstream or downstream of the target position in the SERPINA1 gene, e.g., in Exon V or an intron adjacent to Exon V (e.g., either 5′ or 3′ of Exon V).

[0282] In certain embodiments, first and second single strand breaks can be accompanied by two additional single strand breaks positioned by a third gRNA molecule and a fourth gRNA molecule. For example, the targeting domain of a first and second gRNA molecule are configured such that two single strand breaks are positioned upstream of the target position in the SERPINA1 gene, e.g., one or more nucleotide mutations in the SERPINA1 gene (e.g., a mutation at c.1024 or c.791 in the SERPINA1 gene), which results in expression of an A1AT mutant protein comprising E342K or E264V, e.g., within 1, 2, 3, 4, 5, 10, 15, 20, 25, 30, 35, 40, 45, 50, 60, 70, 80, 90, 100, 150, 200, 250, 300, 350, 400, 450 or 500 nucleotides of the target position in the SERPINA1 gene, e.g., one or more nucleotide mutations in the SERPINA1 gene (e.g., a mutation at c.1024 or c.791 in the SERPINA1 gene), which results in expression of an A1AT mutant protein comprising E342K or E264V; and the targeting domains of a third and fourth gRNA molecule are configured such that two single strand breaks are positioned downstream of the target position in the SERPINA1 gene, e.g., one or more nucleotide mutations in the SERPINA1 gene (e.g., a mutation at c.1024 or c.791 in the SERPINA1 gene), which results in expression of an A1AT mutant protein comprising E342K or E264V, e.g., within 1, 2, 3, 4, 5, 10, 15, 20, 25, 30, 35, 40, 45, 50, 60, 70, 80, 90, 100, 150, 200, 250, 300, 350, 400, 450 or 500 nucleotides of the target position in the SERPINA1 gene, e.g., one or more nucleotide mutations in the SERPINA1 gene (e.g., a mutation at c.1024 or c.791 in the SERPINA1 gene), which results in expression of an A1AT mutant protein comprising E342K or E264V. In certain embodiments, the break is positioned upstream or downstream of the target position in the SERPINA1 gene, e.g., in Exon V or an intron adjacent to Exon V (e.g., either 5′ or 3′ of Exon V).

NHEJ-Mediated Introduction of an Indel in Close Proximity to or within the Early Coding Region of the A1AT Deficiency Knockout Position

[0283] In certain embodiments, the methods disclosed herein (see, e.g., Approaches 2A and 2B) comprise knocking out the SERPINA1 gene to treat or prevent A1AT deficiency. In certain of these embodiments, knockout of the SERPINA1 gene is accomplished by insertion or deletion (e.g., NHEJ-mediated insertion or deletion) of one or more nucleotides in close proximity to or within the early coding region of the SERPINA1 gene. As described herein, in certain embodiments, the methods comprise introduction of one or more breaks (e.g., single strand breaks or double strand breaks) sufficiently close to (e.g., either 5′ or 3′ to) the early coding region of the A1AT target knockout position, such that the break-induced indel could be reasonably expected to span the A1AT target knockout position (e.g., the early coding region). While not wishing to be bound by theory, it is believed that NHEJ-mediated repair of the break(s) allows for the NHEJ-mediated introduction of an indel in close proximity to within the early coding region of the A1AT target knockout position.

[0284] In certain embodiments, the targeting domain of a first gRNA molecule is configured to provide a cleavage event, e.g., a double strand break or a single strand break, sufficiently close to the early coding region in the SERPINA1 gene to allow alteration, e.g., alteration associated with NHEJ in the SERPINA1 gene. In certain embodiments, the targeting domain is configured such that a cleavage event, e.g., a double strand or single strand break, is positioned within 1, 2, 3, 4, 5, 10, 15, 20, 25, 30, 35, 40, 45, 50, 60, 70, 80, 90, 100, 150, 200, 250, 300, 350, 400, 450, or 500 nucleotides of an A1AT target knockout position. The break, e.g., a double strand or single strand break, can be positioned upstream or downstream of an A1AT target knockout position in the SERPINA1 gene.

[0285] In certain embodiments, a second gRNA molecule comprising a second targeting domain is configured to provide a cleavage event, e.g., a double strand break or a single strand break, sufficiently close to the early coding region in the SERPINA1 gene, to allow alteration, e.g., alteration associated with NHEJ in the SERPINA1 gene, either alone or in combination with the break positioned by said first gRNA molecule. In certain embodiments, the targeting domains of the first and second gRNA molecules are configured such that a cleavage event, e.g., a double strand or single strand break, is positioned, independently for each of the gRNA molecules, within 1, 2, 3, 4, 5, 10, 15, 20, 25, 30, 35, 40, 45, 50, 60, 70, 80, 90, 100, 150, 200, 250, 300, 350, 400, 450, or 500 nucleotides of the target position. In certain embodiments, the breaks, e.g., double strand or single strand breaks, are positioned on either side of a nucleotide of an A1AT target knockout position in the SERPINA1 gene. In other embodiments, the breaks, e.g., double strand or single strand breaks, are both positioned on one side, e.g., upstream or downstream, of a nucleotide of a A1AT target knockout position in the SERPINA1 gene.

[0286] In certain embodiments, a single strand break is accompanied by an additional single strand break, positioned by a second gRNA molecule, as discussed below. For example, the targeting domains may be configured such that a cleavage event, e.g., two single strand breaks, is positioned within 1, 2, 3, 4, 5, 10, 15, 20, 25, 30, 35, 40, 45, 50, 60, 70, 80, 90, 100, 150, 200, 250, 300, 350, 400, 450, or 500 nucleotides of the early coding region in the SERPINA1 gene. In certain embodiments, the first and second gRNA molecules are configured such that, when guiding a Cas9 nickase, a single strand break will be accompanied by an additional single strand break, positioned by a second gRNA, sufficiently close to one another to result in alteration of the early coding region in the SERPINA1 gene. In certain embodiments, the first and second gRNA molecules are configured such that a single strand break positioned by said second gRNA is within 10, 20, 30, 40, or 50 nucleotides of the break positioned by said first gRNA molecule, e.g., when the Cas9 is a nickase. In certain embodiments, the two gRNA molecules are configured to position cuts at the same position, or within a few nucleotides of one another, on different strands, e.g., essentially mimicking a double strand break.

[0287] In certain embodiments, a double strand break can be accompanied by an additional double strand break, positioned by a second gRNA molecule, as is discussed below. For example, the targeting domain of a first gRNA molecule is configured such that a double strand break is positioned upstream of the early coding region in the SERPINA1 gene, e.g., within 1, 2, 3, 4, 5, 10, 15, 20, 25, 30, 35, 40, 45, 50, 60, 70, 80, 90, 100, 150, 200, 250, 300, 350, 400, 450, or 500 nucleotides of the target position; and the targeting domain of a second gRNA molecule is configured such that a double strand break is positioned downstream of the early coding region in the SERPINA1 gene, e.g., within 1, 2, 3, 4, 5, 10, 15, 20, 25, 30, 35, 40, 45, 50, 60, 70, 80, 90, 100, 150, 200, 250, 300, 350, 400, 450, or 500 nucleotides of the target position.

[0288] In certain embodiments, a double strand break can be accompanied by two additional single strand breaks, positioned by a second gRNA molecule and a third gRNA molecule. For example, the targeting domain of a first gRNA molecule is configured such that a double strand break is positioned upstream of the early coding region in the SERPINA1 gene, e.g., within 1, 2, 3, 4, 5, 10, 15, 20, 25, 30, 35, 40, 45, 50, 60, 70, 80, 90, 100, 150, 200, 250, 300, 350, 400, 450, or 500 nucleotides of the target position; and the targeting domains of a second and third gRNA molecule are configured such that two single strand breaks are positioned downstream of the early coding region in the SERPINA1 gene, e.g., within 1, 2, 3, 4, 5, 10, 15, 20, 25, 30, 35, 40, 45, 50, 60, 70, 80, 90, 100, 150, 200, 250, 300, 350, 400, 450, or 500 nucleotides of the target position. In certain embodiments, the targeting domains of the first, second and third gRNA molecules are configured such that a cleavage event, e.g., a double strand or single strand break, is positioned, independently for each of the gRNA molecules.

[0289] In certain embodiments, a first and second single strand break can be accompanied by two additional single strand breaks positioned by a third and fourth gRNA molecule. For example, the targeting domains of a first and second gRNA molecule are configured such that two single strand breaks are positioned upstream of the early coding region in the SERPINA1 gene, e.g., within 1, 2, 3, 4, 5, 10, 15, 20, 25, 30, 35, 40, 45, 50, 60, 70, 80, 90, 100, 150, 200, 250, 300, 350, 400, 450, or 500 nucleotides of the early coding region in the SERPINA1 gene; and the targeting domains of a third and fourth gRNA molecule are configured such that two single strand breaks are positioned downstream of a A1AT target knockout position in the early coding region in the SERPINA1 gene, e.g., within 1, 2, 3, 4, 5, 10, 15, 20, 25, 30, 35, 40, 45, 50, 60, 70, 80, 90, 100, 150, 200, 250, 300, 350, 400, 450, or 500 nucleotides of the early coding region in the SERPINA1 gene.

### NHEJ-Mediated Deletion of at Least a Portion of the SERPINA1 Gene at the A1AT Target Position

[0290] In certain embodiments, the methods disclosed herein (see, e.g., Approach 1B) comprise knocking out the SERPINA1 gene to treat or prevent A1AT deficiency. In certain of these embodiments, knockout of the SERPINA1 gene is accomplished by deletion (e.g., NHEJ-mediated deletion) of a genomic sequence including at least a portion of the SERPINA1 gene, wherein said portion of the SERPINA1 gene includes a mutation, e.g., a mutation described herein, e.g., a Z mutation. In certain embodiments, the method comprises the introduction of two double strand breaks—one 5′ and the other 3′ to (i.e., flanking) the A1AT target position (e.g., a mutation in the SERPINA1 gene). Two gRNAs, e.g., unimolecular (or chimeric) or modular gRNA molecules, are configured to position the two double strand breaks on opposite sides of the A1AT target knockout position (e.g., at least a portion of Exon IV, Exon V, or both that includes a mutation) in the SERPINA1 gene. In certain embodiments, the first double strand break is positioned upstream of the mutation, and the second double strand break is positioned downstream of the mutation. In certain embodiments, the two double strand breaks are positioned to remove a portion of Exon IV, Exon V, or both. In certain embodiments, the breaks (i.e., the two double strand breaks) are positioned to avoid unwanted target chromosome elements, such as repeat elements, e.g., an Alu repeat, or the endogenous splice sites.

[0291] While not wishing to be bound by theory, it is believed that the two double strand breaks allow for NHEJ-mediated deletion of a least a portion of the SERPINA1 gene that contains the mutation.

[0292] In certain embodiments, the method comprises introducing a NHEJ-mediated deletion of a genomic sequence including a mutation in the SERPINA1 gene, e.g., a mutation described herein. As described herein, in one embodiment, the method comprises the introduction of two sets of breaks (e.g., one double strand break and a pair of single strand breaks)-one 5′ and the other 3′ to (i.e., flanking) the A1AT target position (e.g., at least a portion of Exon IV, Exon V, or both that includes a mutation). Two gRNAs, e.g., unimolecular (or chimeric) or modular gRNA molecules, are configured to position the two sets of breaks (either the double strand break or the pair of single strand breaks) on opposite sides of the A1AT target position in the SERPINA1 gene. In certain embodiments, the breaks (i.e., the two sets of breaks (either the double strand break or the pair of single strand breaks)) are positioned to avoid unwanted target chromosome elements, such as repeat elements, e.g., an Alu repeat, or the endogenous splice sites.

[0293] While not wishing to be bound by theory, it is believed that the two sets of breaks (e.g., one double strand break and a pair of single strand breaks) allow for NHEJ-mediated deletion of a least a portion of the SERPINA1 gene that contains the mutation.

[0294] In certain embodiments, the method comprises introducing a NHEJ-mediated deletion of a genomic sequence including a mutation in the SERPINA1 gene, e.g., a mutation described herein. As described herein, in one embodiment, the method comprises the introduction of two sets of breaks (e.g., two pairs of single strand breaks)-one 5′ and the other 3′ to (i.e., flanking) the A1AT target position (e.g., at least a portion of Exon IV, Exon V, or both that includes a mutation). Two gRNAs, e.g., unimolecular (or chimeric) or modular gRNA molecules, are configured to position the two sets of breaks on opposite sides of the A1AT target knockout position in the SERPINA1 gene. In certain embodiments, the breaks (i.e., the two pairs of single strand breaks) are positioned to avoid unwanted target chromosome elements, such as repeat elements, e.g., an Alu repeat, or the endogenous splice sites.

[0295] While not wishing to be bound by theory, it is believed that the two sets of breaks (e.g., the two pair of single strand breaks) allow for NHEJ-mediated deletion of a least a portion of the SERPINA1 gene that contains the mutation.

Guide RNA (gRNA) Molecules

[0296] A gRNA molecule, as that term is used herein, refers to a nucleic acid that promotes the specific targeting or homing of a gRNA molecule/RNA-guided nuclease (e.g., Cas9 molecule) complex to a target nucleic acid. gRNA molecules can be unimolecular (having a single RNA molecule), sometimes referred to herein as “chimeric” gRNAs, or modular (comprising more than one, and typically two, separate RNA molecules). The gRNA molecules provided herein comprise a targeting domain comprising, consisting of, or consisting essentially of a nucleic acid sequence fully or partially complementary to a target nucleic acid sequence in or near the SERPINA1 gene. In certain embodiments, the gRNA molecule further comprises one or more additional domains, including for example a first complementarity domain, a linking domain, a second complementarity domain, a proximal domain, a tail domain, and a 5′ extension domain. Each of these domains is discussed in detail below. In certain embodiments, one or more of the domains in the gRNA molecule comprises a nucleotide sequence identical to or sharing sequence homology with a naturally occurring sequence, e.g., from S. pyogenes, S. aureus, or S. thermophilus.

[0297] Several exemplary gRNA structures are provided in FIGS. 1A-1I. With regard to the three-dimensional form, or intra- or inter-strand interactions of an active form of a gRNA, regions of high complementarity are sometimes shown as duplexes in FIGS. 1A-1I and other depictions provided herein. FIG. 7 illustrates gRNA domain nomenclature using the gRNA sequence of SEQ ID NO:42, which contains one hairpin loop in the tracrRNA-derived region. In certain embodiments, a gRNA may contain more than one (e.g., two, three, or more) hairpin loops in this region (see, e.g., FIGS. 1H-1I).

[0298] In certain embodiments, a unimolecular, or chimeric, gRNA comprises, preferably from 5′ to 3′:
[0299] a targeting domain complementary to a target domain in the SERPINA1 gene, e.g., a targeting domain from any of SEQ ID NOs:253-2192;
[0300] a first complementarity domain;
[0301] a linking domain;
[0302] a second complementarity domain (which is complementary to the first complementarity domain);
[0303] a proximal domain; and
[0304] optionally, a tail domain.

[0305] In certain embodiments, a modular gRNA comprises:
[0306] a first strand comprising, preferably from 5′ to 3′:
   [0307] a targeting domain complementary to a target domain in the SERPINA1 gene, e.g., a targeting domain from any of SEQ ID NOs:253-2192; and
   [0308] a first complementarity domain; and
[0309] a second strand, comprising, preferably from 5′ to 3′:
   [0310] optionally, a 5′ extension domain;
   [0311] a second complementarity domain;
   [0312] a proximal domain; and
   [0313] optionally, a tail domain.

### Targeting Domain

[0314] The targeting domain (sometimes referred to alternatively as the guide sequence or complementarity region) comprises, consists of, or consists essentially of a nucleic acid sequence that is complementary or partially complementary to a nucleic acid sequence in or near the SERPINA1 gene. The nucleic acid sequence in or near the SERPINA1 gene to which all or a portion of the targeting domain is complementary or partially complementary is referred to herein as the target domain. In certain embodiments, the target domain comprises an A1AT target position. In other embodiments, an A1AT target position lies outside (i.e., upstream or downstream of) the target domain.

[0315] Methods for selecting targeting domains are known in the art (see, e.g., Fu 2014; Sternberg 2014). Examples of suitable targeting domains for use in the methods, compositions, and kits described herein include those set forth in SEQ ID NOs:253-2192.

[0316] The strand of the target nucleic acid comprising the target domain is referred to herein as the complementary strand because it is complementary to the targeting domain sequence. Since the targeting domain is part of a gRNA molecule, it comprises the base uracil (U) rather than thymine (T); conversely, any DNA molecule encoding the gRNA molecule will comprise thymine rather than uracil. In a targeting domain/target domain pair, the uracil bases in the targeting domain will pair with the adenine bases in the target domain. In certain embodiments, the degree of complementarity between the targeting domain and target domain is sufficient to allow targeting of an RNA-guided nuclease (e.g., a Cas9 molecule) to the target nucleic acid.

[0317] In certain embodiments, the targeting domain comprises a core domain and an optional secondary domain. In certain of these embodiments, the core domain is located 3′ to the secondary domain, and in certain of these embodiments the core domain is located at or near the 3′ end of the targeting domain. In certain of these embodiments, the core domain consists of or consists essentially of about 8 to about 13 nucleotides at the 3′ end of the targeting domain. In certain embodiments, only the core domain is complementary or partially complementary to the corresponding portion of the target domain, and in certain of these embodiments the core domain is fully complementary to the corresponding portion of the target domain. In other embodiments, the secondary domain is also complementary or partially complementary to a portion of the target domain. In certain embodiments, the core domain is complementary or partially complementary to a core domain target in the target domain, while the secondary domain is complementary or partially complementary to a secondary domain target in the target domain. In certain embodiments, the core domain and secondary domain have the same degree of complementarity with their respective corresponding portions of the target domain. In other embodiments, the degree of complementarity between the core domain and its target and the degree of complementarity between the secondary domain and its target may differ. In certain of these embodiments, the core domain may have a higher degree of complementarity for its target than the secondary domain, whereas in other embodiments the secondary domain may have a higher degree of complementarity than the core domain.

[0318] In certain embodiments, the targeting domain and/or the core domain within the targeting domain is 3 to 100, 5 to 100, 10 to 100, or 20 to 100 nucleotides in length, and in certain of these embodiments the targeting domain or core domain is 3 to 15, 3 to 20, 5 to 20, 10 to 20, 15 to 20, 5 to 50, 10 to 50, or 20 to 50 nucleotides in length. In certain embodiments, the targeting domain and/or the core domain within the targeting domain is 6, 7, 8, 9, 10, 11, 12, 13, 14, 15, 16, 17, 18, 19, 20, 21, 22, 23, 24, 25, or 26 nucleotides in length. In certain embodiments, the targeting domain and/or the core domain within the targeting domain is 6+/−2, 7+/−2, 8+/−2, 9+/−2, 10+/−2, 10+/−4, 10+/−5, 11+/−2, 12+/−2, 13+/−2, 14+/−2, 15+/−2, or 16+−2, 20+/−5, 30+/−5, 40+/−5, 50+/−5, 60+/−5, 70+/−5, 80+/−5, 90+/−5, or 100+/−5 nucleotides in length.

[0319] In certain embodiments wherein the targeting domain includes a core domain, the core domain is 3 to 20 nucleotides in length, and in certain of these embodiments the core domain 5 to 15 or 8 to 13 nucleotides in length. In certain embodiments wherein the targeting domain includes a secondary domain, the secondary domain is 0, 1, 2, 3, 4, 5, 6, 7, 8, 9, 10, 11, 12, 13, 14 or 15 nucleotides in length. In certain embodiments wherein the targeting domain comprises a core domain that is 8 to 13 nucleotides in length, the targeting domain is 26, 25, 24, 23, 22, 21, 20, 19, 18, 17, or 16 nucleotides in length, and the secondary domain is 13 to 18, 12 to 17, 11 to 16, 10 to 15, 9 to 14, 8 to 13, 7 to 12, 6 to 11, 5 to 10, 4 to 9, or 3 to 8 nucleotides in length, respectively.

[0320] In certain embodiments, the targeting domain is fully complementary to the target domain. Likewise, where the targeting domain comprises a core domain and/or a secondary domain, in certain embodiments one or both of the core domain and the secondary domain are fully complementary to the corresponding portions of the target domain. In other embodiments, the targeting domain is partially complementary to the target domain, and in certain of these embodiments where the targeting domain comprises a core domain and/or a secondary domain, one or both of the core domain and the secondary domain are partially complementary to the corresponding portions of the target domain. In certain of these embodiments, the nucleic acid sequence of the targeting domain, or the core domain or targeting domain within the targeting domain, is at least 80, 85, 90, or 95% complementary to the target domain or to the corresponding portion of the target domain. In certain embodiments, the targeting domain and/or the core or secondary domains within the targeting domain include one or more nucleotides that are not complementary with the target domain or a portion thereof, and in certain of these embodiments the targeting domain and/or the core or secondary domains within the targeting domain include 1, 2, 3, 4, 5, 6, 7, or 8 nucleotides that are not complementary with the target domain. In certain embodiments, the core domain includes 1, 2, 3, 4, or 5 nucleotides that are not complementary with the corresponding portion of the target domain. In certain embodiments wherein the targeting domain includes one or more nucleotides that are not complementary with the target domain, one or more of said non-complementary nucleotides are located within five nucleotides of the 5′ or 3′ end of the targeting domain. In certain of these embodiments, the targeting domain includes 1, 2, 3, 4, or 5 nucleotides within five nucleotides of its 5′ end, 3′ end, or both its 5′ and 3′ ends that are not complementary to the target domain. In certain embodiments wherein the targeting domain includes two or more nucleotides that are not complementary to the target domain, two or more of said non-complementary nucleotides are adjacent to one another, and in certain of these embodiments the two or more consecutive non-complementary nucleotides are located within five nucleotides of the 5′ or 3′ end of the targeting domain. In other embodiments, the two or more consecutive non-complementary nucleotides are both located more than five nucleotides from the 5′ and 3′ ends of the targeting domain.

[0321] In certain embodiments, the targeting domain, core domain, and/or secondary domain do not comprise any modifications. In other embodiments, the targeting domain, core domain, and/or secondary domain, or one or more nucleotides therein, have a modification, including but not limited to the modifications set forth below. In certain embodiments, one or more nucleotides of the targeting domain, core domain, and/or secondary domain may comprise a 2′ modification (e.g., a modification at the 2′ position on ribose), e.g., a 2-acetylation, e.g., a 2′ methylation. In certain embodiments, the backbone of the targeting domain can be modified with a phosphorothioate. In certain embodiments, modifications to one or more nucleotides of the targeting domain, core domain, and/or secondary domain render the targeting domain and/or the gRNA comprising the targeting domain less susceptible to degradation or more bio-compatible, e.g., less immunogenic. In certain embodiments, the targeting domain and/or the core or secondary domains include 1, 2, 3, 4, 5, 6, 7, or 8 or more modifications, and in certain of these embodiments the targeting domain and/or core or secondary domains include 1, 2, 3, or 4 modifications within five nucleotides of their respective 5′ ends and/or 1, 2, 3, or 4 modifications within five nucleotides of their respective 3′ ends. In certain embodiments, the targeting domain and/or the core or secondary domains comprise modifications at two or more consecutive nucleotides.

[0322] In certain embodiments wherein the targeting domain includes core and secondary domains, the core and secondary domains contain the same number of modifications. In certain of these embodiments, both domains are free of modifications. In other embodiments, the core domain includes more modifications than the secondary domain, or vice versa.

[0323] In certain embodiments, modifications to one or more nucleotides in the targeting domain, including in the core or secondary domains, are selected to not interfere with targeting efficacy, which can be evaluated by testing a candidate modification using a system as set forth below. gRNAs having a candidate targeting domain having a selected length, sequence, degree of complementarity, or degree of modification can be evaluated using a system as set forth below. The candidate targeting domain can be placed, either alone or with one or more other candidate changes in a gRNA molecule/RNA-guided nuclease (e.g., Cas9 molecule) system known to be functional with a selected target, and evaluated.

[0324] In certain embodiments, all of the modified nucleotides are complementary to and capable of hybridizing to corresponding nucleotides present in the target domain. In another embodiment, 1, 2, 3, 4, 5, 6, 7, or 8 or more modified nucleotides are not complementary to or capable of hybridizing to corresponding nucleotides present in the target domain.

[0325] FIGS. 1A-1I provide examples of the placement of the targeting domain within a gRNA molecule.

### First and Second Complementarity Domains

[0326] The first and second complementarity (sometimes referred to alternatively as the crRNA-derived hairpin sequence and tracrRNA-derived hairpin sequences, respectively) domains are fully or partially complementary to one another. In certain embodiments, the degree of complementarity is sufficient for the two domains to form a duplexed region under at least some physiological conditions. In certain embodiments, the degree of complementarity between the first and second complementarity domains, together with other properties of the gRNA, is sufficient to allow targeting of an RNA-guided nuclease (e.g., a Cas9 molecule) to a target nucleic acid. Examples of first and second complementarity domains are set forth in FIGS. 1A-1G.

[0327] In certain embodiments (see, e.g., FIGS. 1A-1B) the first and/or second complementarity domain includes one or more nucleotides that lack complementarity with the corresponding complementarity domain. In certain embodiments, the first and/or second complementarity domain includes 1, 2, 3, 4, 5, or 6 nucleotides that do not complement with the corresponding complementarity domain. For example, the second complementarity domain may contain 1, 2, 3, 4, 5, or 6 nucleotides that do not pair with corresponding nucleotides in the first complementarity domain. In certain embodiments, the nucleotides on the first or second complementarity domain that do not complement with the corresponding complementarity domain loop out from the duplex formed between the first and second complementarity domains. In certain of these embodiments, the unpaired loop-out is located on the second complementarity domain, and in certain of these embodiments the unpaired region begins 1, 2, 3, 4, 5, or 6 nucleotides from the 5′ end of the second complementarity domain.

[0328] In certain embodiments, the first complementarity domain is 5 to 30, 5 to 25, 7 to 25, 5 to 24, 5 to 23, 7 to 22, 5 to 22, 5 to 21, 5 to 20, 7 to 18, 7 to 15, 9 to 16, or 10 to 14 nucleotides in length, and in certain of these embodiments the first complementarity domain is 5, 6, 7, 8, 9, 10, 11, 12, 13, 14, 15, 16, 17, 18, 19, 20, 21, 22, 23, 24, or 25 nucleotides in length. In certain embodiments, the second complementarity domain is 5 to 27, 7 to 27, 7 to 25, 5 to 24, 5 to 23, 5 to 22, 5 to 21, 7 to 20, 5 to 20, 7 to 18, 7 to 17, 9 to 16, or 10 to 14 nucleotides in length, and in certain of these embodiments the second complementarity domain is 5, 6, 7, 8, 9, 10, 11, 12, 13, 14, 15, 16, 17, 18, 19, 20, 21, 22, 23, 24, 25, or 26 nucleotides in length. In certain embodiments, the first and second complementarity domains are each independently 6+/−2, 7+/−2, 8+/−2, 9+/−2, 10+/−2, 11+/−2, 12+/−2, 13+/−2, 14+/−2, 15+/−2, 16+/−2, 17+/−2, 18+/−2, 19+/−2, or 20+/−2, 21+/−2, 22+/−2, 23+/−2, or 24+/−2 nucleotides in length. In certain embodiments, the second complementarity domain is longer than the first complementarity domain, e.g., 2, 3, 4, 5, or 6 nucleotides longer.

[0329] In certain embodiments, the first and/or second complementarity domains each independently comprise three subdomains, which, in the 5′ to 3′ direction are: a 5′ subdomain, a central subdomain, and a 3′ subdomain. In certain embodiments, the 5′ subdomain and 3′ subdomain of the first complementarity domain are fully or partially complementary to the 3′ subdomain and 5′ subdomain, respectively, of the second complementarity domain.

[0330] In certain embodiments, the 5′ subdomain of the first complementarity domain is 4 to 9 nucleotides in length, and in certain of these embodiments the 5′ domain is 4, 5, 6, 7, 8, or 9 nucleotides in length. In certain embodiments, the 5′ subdomain of the second complementarity domain is 3 to 25, 4 to 22, 4 to 18, or 4 to 10 nucleotides in length, and in certain of these embodiments the 5′ domain is 3, 4, 5, 6, 7, 8, 9, 10, 11, 12, 13, 14, 15, 16, 17, 18, 19, 20, 21, 22, 23, 24, or 25 nucleotides in length. In certain embodiments, the central subdomain of the first complementarity domain is 1, 2, or 3 nucleotides in length. In certain embodiments, the central subdomain of the second complementarity domain is 1, 2, 3, 4, or 5 nucleotides in length. In certain embodiments, the 3′ subdomain of the first complementarity domain is 3 to 25, 4 to 22, 4 to 18, or 4 to 10 nucleotides in length, and in certain of these embodiments the 3′ subdomain is 3, 4, 5, 6, 7, 8, 9, 10, 11, 12, 13, 14, 15, 16, 17, 18, 19, 20, 21, 22, 23, 24, or 25 nucleotides in length. In certain embodiments, the 3′ subdomain of the second complementarity domain is 4 to 9, e.g., 4, 5, 6, 7, 8, or 9 nucleotides in length.

[0331] The first and/or second complementarity domains can share homology with, or be derived from, naturally occurring or reference first and/or second complementarity domains. In certain of these embodiments, the first and/or second complementarity domains have at least 50%, 60%, 70%, 80%, 85%, 90%, or 95% homology with, or differ by no more than 1, 2, 3, 4, 5, or 6 nucleotides from, the naturally occurring or reference first and/or second complementarity domain. In certain of these embodiments, the first and/or second complementarity domains may have at least 50%, 60%, 70%, 80%, 85%, 90%, or 95% homology with homology with a first and/or second complementarity domain from S. pyogenes or S. aureus.

[0332] In certain embodiments, the first and/or second complementarity domains do not comprise any modifications. In other embodiments, the first and/or second complementarity domains or one or more nucleotides therein have a modification, including but not limited to a modification set forth below. In certain embodiments, one or more nucleotides of the first and/or second complementarity domain may comprise a 2′ modification (e.g., a modification at the 2′ position on ribose), e.g., a 2-acetylation, e.g., a 2′ methylation. In certain embodiments, the backbone of the targeting domain can be modified with a phosphorothioate. In certain embodiments, modifications to one or more nucleotides of the first and/or second complementarity domain render the first and/or second complementarity domain and/or the gRNA comprising the first and/or second complementarity less susceptible to degradation or more bio-compatible, e.g., less immunogenic. In certain embodiments, the first and/or second complementarity domains each independently include 1, 2, 3, 4, 5, 6, 7, or 8 or more modifications, and in certain of these embodiments the first and/or second complementarity domains each independently include 1, 2, 3, or 4 modifications within five nucleotides of their respective 5′ ends, 3′ ends, or both their 5′ and 3′ ends. In other embodiments, the first and/or second complementarity domains each independently contain no modifications within five nucleotides of their respective 5′ ends, 3′ ends, or both their 5′ and 3′ ends. In certain embodiments, one or both of the first and second complementarity domains comprise modifications at two or more consecutive nucleotides.

[0333] In certain embodiments, modifications to one or more nucleotides in the first and/or second complementarity domains are selected to not interfere with targeting efficacy, which can be evaluated by testing a candidate modification in the system set forth below. gRNAs having a candidate first or second complementarity domain having a selected length, sequence, degree of complementarity, or degree of modification can be evaluated using a system as set forth below. The candidate complementarity domain can be placed, either alone or with one or more other candidate changes in a gRNA molecule/Cas9 molecule system known to be functional with a selected target, and evaluated.

[0334] In certain embodiments, the duplexed region formed by the first and second complementarity domains is, for example, 6, 7, 8, 9, 10, 11, 12, 13, 14, 15, 16, 17, 18, 19, 20, 21, or 22 bp in length, excluding any looped out or unpaired nucleotides.

[0335] In certain embodiments, the first and second complementarity domains, when duplexed, comprise 11 paired nucleotides (see, for e.g., gRNA of SEQ ID NO:48). In certain embodiments, the first and second complementarity domains, when duplexed, comprise 15 paired nucleotides (see, e.g., gRNA of SEQ ID NO:50). In certain embodiments, the first and second complementarity domains, when duplexed, comprise 16 paired nucleotides (see, e.g., gRNA of SEQ ID NO:51). In certain embodiments, the first and second complementarity domains, when duplexed, comprise 21 paired nucleotides (see, e.g., gRNA of SEQ ID NO:29).

[0336] In certain embodiments, one or more nucleotides are exchanged between the first and second complementarity domains to remove poly-U tracts. For example, nucleotides 23 and 48 or nucleotides 26 and 45 of the gRNA of SEQ ID NO:48 may be exchanged to generate the gRNA of SEQ ID NOs:49 or 31, respectively. Similarly, nucleotides 23 and 39 of the gRNA of SEQ ID NO:29 may be exchanged with nucleotides 50 and 68 to generate the gRNA of SEQ ID NO:30.

### Linking Domain

[0337] The linking domain is disposed between and serves to link the first and second complementarity domains in a unimolecular or chimeric gRNA. FIGS. 1B-1E provide examples of linking domains. In certain embodiments, part of the linking domain is from a crRNA-derived region, and another part is from a tracrRNA-derived region.

[0338] In certain embodiments, the linking domain links the first and second complementarity domains covalently. In certain of these embodiments, the linking domain consists of or comprises a covalent bond. In other embodiments, the linking domain links the first and second complementarity domains non-covalently. In certain embodiments, the linking domain is ten or fewer nucleotides in length, e.g., 1, 2, 3, 4, 5, 6, 7, 8, 9, or 10 nucleotides. In other embodiments, the linking domain is greater than 10 nucleotides in length, e.g., 11, 12, 13, 14, 15, 16, 17, 18, 19, 20, 21, 22, 23, 24, or 25 or more nucleotides. In certain embodiments, the linking domain is 2 to 50, 2 to 40, 2 to 30, 2 to 20, 2 to 10, 2 to 5, 10 to 100, 10 to 90, 10 to 80, 10 to 70, 10 to 60, 10 to 50, 10 to 40, 10 to 30, 10 to 20, 10 to 15, 20 to 100, 20 to 90, 20 to 80, 20 to 70, 20 to 60, 20 to 50, 20 to 40, 20 to 30, or 20 to 25 nucleotides in length. In certain embodiments, the linking domain is 10+/−5, 20+/−5, 20+/−10, 30+/−5, 30+/−10, 40+/−5, 40+/−10, 50+/−5, 50+/−10, 60+/−5, 60+/−10, 70+/−5, 70+/−10, 80+/−5, 80+/−10, 90+/−5, 90+/−10, 100+/−5, or 100+/−10 nucleotides in length.

[0339] In certain embodiments, the linking domain shares homology with, or is derived from, a naturally occurring sequence, e.g., the sequence of a tracrRNA that is 5′ to the second complementarity domain. In certain embodiments, the linking domain has at least 50%, 60%, 70%, 80%, 90%, or 95% homology with or differs by no more than 1, 2, 3, 4, 5, or 6 nucleotides from a linking domain disclosed herein, e.g., the linking domains of FIGS. 1B-1E.

[0340] In certain embodiments, the linking domain does not comprise any modifications. In other embodiments, the linking domain or one or more nucleotides therein have a modification, including but not limited to the modifications set forth below. In certain embodiments, one or more nucleotides of the linking domain may comprise a 2′ modification (e.g., a modification at the 2′ position on ribose), e.g., a 2-acetylation, e.g., a 2′ methylation. In certain embodiments, the backbone of the linking domain can be modified with a phosphorothioate. In certain embodiments, modifications to one or more nucleotides of the linking domain render the linking domain and/or the gRNA comprising the linking domain less susceptible to degradation or more bio-compatible, e.g., less immunogenic. In certain embodiments, the linking domain includes 1, 2, 3, 4, 5, 6, 7, or 8 or more modifications, and in certain of these embodiments the linking domain includes 1, 2, 3, or 4 modifications within five nucleotides of its 5′ and/or 3′ end. In certain embodiments, the linking domain comprises modifications at two or more consecutive nucleotides.

[0341] In certain embodiments, modifications to one or more nucleotides in the linking domain are selected to not interfere with targeting efficacy, which can be evaluated by testing a candidate modification using a system as set forth below. gRNAs having a candidate linking domain having a selected length, sequence, degree of complementarity, or degree of modification can be evaluated in a system as set forth below. The candidate linking domain can be placed, either alone or with one or more other candidate changes in a gRNA molecule/RNA-guided nuclease (e.g., Cas9 molecule) system known to be functional with a selected target, and evaluated.

[0342] In certain embodiments, the linking domain comprises a duplexed region, typically adjacent to or within 1, 2, or 3 nucleotides of the 3′ end of the first complementarity domain and/or the 5′ end of the second complementarity domain. In certain of these embodiments, the duplexed region of the linking region is 10+/−5, 15+/−5, 20+/−5, 20+/−10, or 30+/−5 bp in length. In certain embodiments, the duplexed region of the linking domain is 1, 2, 3, 4, 5, 6, 7, 8, 9, 10, 11, 12, 13, 14, or 15 bp in length. In certain embodiments, the sequences forming the duplexed region of the linking domain are fully complementarity. In other embodiments, one or both of the sequences forming the duplexed region contain one or more nucleotides (e.g., 1, 2, 3, 4, 5, 6, 7, or 8 nucleotides) that are not complementary with the other duplex sequence.

### 5′ Extension Domain

[0343] In certain embodiments, a modular gRNA as disclosed herein comprises a 5′ extension domain, i.e., one or more additional nucleotides 5′ to the second complementarity domain (see, e.g., FIG. 1A). In certain embodiments, the 5′ extension domain is 2 to 10 or more, 2 to 9, 2 to 8, 2 to 7, 2 to 6, 2 to 5, or 2 to 4 nucleotides in length, and in certain of these embodiments the 5′ extension domain is 2, 3, 4, 5, 6, 7, 8, 9, or 10 or more nucleotides in length.

[0344] In certain embodiments, the 5′ extension domain nucleotides do not comprise modifications, e.g., modifications of the type provided below. However, in certain embodiments, the 5′ extension domain comprises one or more modifications, e.g., modifications that it render it less susceptible to degradation or more bio-compatible, e.g., less immunogenic. By way of example, the backbone of the 5′ extension domain can be modified with a phosphorothioate, or other modification(s) as set forth below. In certain embodiments, a nucleotide of the 5′ extension domain can comprise a 2′ modification (e.g., a modification at the 2′ position on ribose), e.g., a 2-acetylation, e.g., a 2′ methylation, or other modification(s) as set forth below.

[0345] In certain embodiments, the 5′ extension domain can comprise as many as 1, 2, 3, 4, 5, 6, 7, or 8 modifications. In certain embodiments, the 5′ extension domain comprises as many as 1, 2, 3, or 4 modifications within 5 nucleotides of its 5′ end, e.g., in a modular gRNA molecule. In certain embodiments, the 5′ extension domain comprises as many as 1, 2, 3, or 4 modifications within 5 nucleotides of its 3′ end, e.g., in a modular gRNA molecule.

[0346] In certain embodiments, the 5′ extension domain comprises modifications at two consecutive nucleotides, e.g., two consecutive nucleotides that are within 5 nucleotides of the 5′ end of the 5′ extension domain, within 5 nucleotides of the 3′ end of the 5′ extension domain, or more than 5 nucleotides away from one or both ends of the 5′ extension domain. In certain embodiments, no two consecutive nucleotides are modified within 5 nucleotides of the 5′ end of the 5′ extension domain, within 5 nucleotides of the 3′ end of the 5′ extension domain, or within a region that is more than 5 nucleotides away from one or both ends of the 5′ extension domain. In certain embodiments, no nucleotide is modified within 5 nucleotides of the 5′ end of the 5′ extension domain, within 5 nucleotides of the 3′ end of the 5′ extension domain, or within a region that is more than 5 nucleotides away from one or both ends of the 5′ extension domain.

[0347] Modifications in the 5′ extension domain can be selected so as to not interfere with gRNA molecule efficacy, which can be evaluated by testing a candidate modification in a system as set forth below. gRNAs having a candidate 5′ extension domain having a selected length, sequence, degree of complementarity, or degree of modification, can be evaluated in a system as set forth below. The candidate 5′ extension domain can be placed, either alone, or with one or more other candidate changes in a gRNA molecule/RNA-guided nuclease (e.g., Cas9 molecule) system known to be functional with a selected target and evaluated.

[0348] In certain embodiments, the 5′ extension domain has at least 60, 70, 80, 85, 90 or 95% homology with, or differs by no more than 1, 2, 3, 4, 5, or 6 nucleotides from, a reference 5′ extension domain, e.g., a naturally occurring, e.g., an S. pyogenes, S. aureus, or S. thermophilus, 5′ extension domain, or a 5′ extension domain described herein, e.g., from FIGS. 1A-1G.

### Proximal Domain

[0349] FIGS. 1A-1G provide examples of proximal domains.

[0350] In certain embodiments, the proximal domain is 5 to 20 or more nucleotides in length, e.g., 5, 6, 7, 8, 9, 10, 11, 12, 13, 14, 15, 16, 17, 18, 19, 20, 21, 22, 23, 24, 25, or 26 nucleotides in length. In certain of these embodiments, the proximal domain is 6+/−2, 7+/−2, 8+/−2, 9+/−2, 10+/−2, 11+/−2, 12+/−2, 13+/−2, 14+/−2, 14+/−2, 16+/−2, 17+/−2, 18+/−2, 19+/−2, or 20+/−2 nucleotides in length. In certain embodiments, the proximal domain is 5 to 20, 7, to 18, 9 to 16, or 10 to 14 nucleotides in length.

[0351] In certain embodiments, the proximal domain can share homology with or be derived from a naturally occurring proximal domain. In certain of these embodiments, the proximal domain has at least 50%, 60%, 70%, 80%, 85%, 90%, or 95% homology with or differs by no more than 1, 2, 3, 4, 5, or 6 nucleotides from a proximal domain disclosed herein, e.g., an S. pyogenes, S. aureus, or S. thermophilus proximal domain, including those set forth in FIGS. 1A-1G.

[0352] In certain embodiments, the proximal domain does not comprise any modifications. In other embodiments, the proximal domain or one or more nucleotides therein have a modification, including but not limited to the modifications set forth in herein. In certain embodiments, one or more nucleotides of the proximal domain may comprise a 2′ modification (e.g., a modification at the 2′ position on ribose), e.g., a 2-acetylation, e.g., a 2′ methylation. In certain embodiments, the backbone of the proximal domain can be modified with a phosphorothioate. In certain embodiments, modifications to one or more nucleotides of the proximal domain render the proximal domain and/or the gRNA comprising the proximal domain less susceptible to degradation or more bio-compatible, e.g., less immunogenic. In certain embodiments, the proximal domain includes 1, 2, 3, 4, 5, 6, 7, or 8 or more modifications, and in certain of these embodiments the proximal domain includes 1, 2, 3, or 4 modifications within five nucleotides of its 5′ and/or 3′ end. In certain embodiments, the proximal domain comprises modifications at two or more consecutive nucleotides.

[0353] In certain embodiments, modifications to one or more nucleotides in the proximal domain are selected to not interfere with targeting efficacy, which can be evaluated by testing a candidate modification in a system as set forth below. gRNAs having a candidate proximal domain having a selected length, sequence, degree of complementarity, or degree of modification can be evaluated in a system as set forth below. The candidate proximal domain can be placed, either alone or with one or more other candidate changes in a gRNA molecule/RNA-guided nuclease (e.g., Cas9 molecule) system known to be functional with a selected target, and evaluated.

### Tail Domain

[0354] A broad spectrum of tail domains are suitable for use in the gRNA molecules disclosed herein. FIGS. 1A and 1C-1G provide examples of such tail domains.

[0355] In certain embodiments, the tail domain is absent. In other embodiments, the tail domain is 1 to 100 or more nucleotides in length, e.g., 1, 2, 3, 4, 5, 6, 7, 8, 9, 10, 20, 30, 40, 50, 60, 70, 80, 90, or 100 nucleotides in length. In certain embodiments, the tail domain is 1 to 5, 1 to 10, 1 to 15, 1 to 20, 1 to 50, 10 to 100, 20 to 100, 10 to 90, 20 to 90, 10 to 80, 20 to 80, 10 to 70, 20 to 70, 10 to 60, 20 to 60, 10 to 50, 20 to 50, 10 to 40, 20 to 40, 10 to 30, 20 to 30, 20 to 25, 10 to 20, or 10 to 15 nucleotides in length. In certain embodiments, the tail domain is 5+/−5, 10+/−5, 20+/−10, 20+/−5, 25+/−10, 30+/−10, 30+/−5, 40+/−10, 40+/−5, 50+/−10, 50+/−5, 60+/−10, 60+/−5, 70+/−10, 70+/−5, 80+/−10, 80+/−5, 90+/−10, 90+/−5, 100+/−10, or 100+/−5 nucleotides in length.

[0356] In certain embodiments, the tail domain can share homology with or be derived from a naturally occurring tail domain or the 5′ end of a naturally occurring tail domain. In certain of these embodiments, the proximal domain has at least 50%, 60%, 70%, 80%, 85%, 90%, or 95% homology with or differs by no more than 1, 2, 3, 4, 5, or 6 nucleotides from a naturally occurring tail domain disclosed herein, e.g., an S. pyogenes, S. aureus, or S. thermophilus tail domain, including those set forth in FIGS. 1A and 1C-1G.

[0357] In certain embodiments, the tail domain includes sequences that are complementary to each other and which, under at least some physiological conditions, form a duplexed region. In certain of these embodiments, the tail domain comprises a tail duplex domain which can form a tail duplexed region. In certain embodiments, the tail duplexed region is 3, 4, 5, 6, 7, 8, 9, 10, 11, or 12 bp in length. In certain embodiments, the tail domain comprises a single stranded domain 3′ to the tail duplex domain that does not form a duplex. In certain of these embodiments, the single stranded domain is 3 to 10 nucleotides in length, e.g., 3, 4, 5, 6, 7, 8, 9, 10, or 4 to 6 nucleotides in length.

[0358] In certain embodiments, the tail domain does not comprise any modifications. In other embodiments, the tail domain or one or more nucleotides therein have a modification, including but not limited to the modifications set forth herein. In certain embodiments, one or more nucleotides of the tail domain may comprise a 2′ modification (e.g., a modification at the 2′ position on ribose), e.g., a 2-acetylation, e.g., a 2′ methylation. In certain embodiments, the backbone of the tail domain can be modified with a phosphorothioate. In certain embodiments, modifications to one or more nucleotides of the tail domain render the tail domain and/or the gRNA comprising the tail domain less susceptible to degradation or more bio-compatible, e.g., less immunogenic. In certain embodiments, the tail domain includes 1, 2, 3, 4, 5, 6, 7, or 8 or more modifications, and in certain of these embodiments the tail domain includes 1, 2, 3, or 4 modifications within five nucleotides of its 5′ and/or 3′ end. In certain embodiments, the tail domain comprises modifications at two or more consecutive nucleotides.

[0359] In certain embodiments, modifications to one or more nucleotides in the tail domain are selected to not interfere with targeting efficacy, which can be evaluated by testing a candidate modification as set forth below. gRNAs having a candidate tail domain having a selected length, sequence, degree of complementarity, or degree of modification can be evaluated using a system as set forth below. The candidate tail domain can be placed, either alone or with one or more other candidate changes in a gRNA molecule/RNA-guided nuclease (e.g., Cas9 molecule) system known to be functional with a selected target, and evaluated.

[0360] In certain embodiments, the tail domain includes nucleotides at the 3′ end that are related to the method of in vitro or in vivo transcription. When a T7 promoter is used for in vitro transcription of the gRNA, these nucleotides may be any nucleotides present before the 3′ end of the DNA template. When a U6 promoter is used for in vivo transcription, these nucleotides may be the sequence UUUUUU. When an H1 promoter is used for transcription, these nucleotides may be the sequence UUUU. When alternate pol-III promoters are used, these nucleotides may be various numbers of uracil bases depending on, e.g., the termination signal of the pol-III promoter, or they may include alternate bases.

[0361] In certain embodiments, the proximal and tail domain taken together comprise, consist of, or consist essentially of the sequence set forth in SEQ ID NOs:32, 33, 34, 35, 36, or 37.

Exemplary Unimolecular/Chimeric gRNAs

[0362] In certain embodiments, a unimolecular or chimeric gRNA as disclosed herein has the structure: 5′ [targeting domain]-[first complementarity domain]-[linking domain]-[second complementarity domain]-[proximal domain]-[tail domain]-3′, wherein:
[0363] the targeting domain comprises a core domain and optionally a secondary domain, and is 10 to 50 nucleotides in length;
[0364] the first complementarity domain is 5 to 25 nucleotides in length and, in certain embodiments has at least 50, 60, 70, 80, 85, 90, or 95% homology with a reference first complementarity domain disclosed herein;
[0365] the linking domain is 1 to 5 nucleotides in length;
[0366] the second complementarity domain is 5 to 27 nucleotides in length and, in certain embodiments has at least 50, 60, 70, 80, 85, 90, or 95% homology with a reference second complementarity domain disclosed herein;
[0367] the proximal domain is 5 to 20 nucleotides in length and, in certain embodiments has at least 50, 60, 70, 80, 85, 90, or 95% homology with a reference proximal domain disclosed herein; and
[0368] the tail domain is absent or a nucleotide sequence is 1 to 50 nucleotides in length and, in certain embodiments has at least 50, 60, 70, 80, 85, 90, or 95% homology with a reference tail domain disclosed herein.

[0369] In certain embodiments, a unimolecular gRNA as disclosed herein comprises, preferably from 5′ to 3′:
[0370] a targeting domain, e.g., comprising 10-50 nucleotides;
[0371] a first complementarity domain, e.g., comprising 15, 16, 17, 18, 19, 20, 21, 22, 23, 24, 25, or 26 nucleotides;
[0372] a linking domain;
[0373] a second complementarity domain;
[0374] a proximal domain; and
[0375] a tail domain,
wherein,
[0376] (a) the proximal and tail domain, when taken together, comprise at least 15, 18, 20, 25, 30, 31, 35, 40, 45, 49, 50, or 53 nucleotides;
[0377] (b) there are at least 15, 18, 20, 25, 30, 31, 35, 40, 45, 49, 50, or 53 nucleotides 3′ to the last nucleotide of the second complementarity domain; or
[0378] (c) there are at least 16, 19, 21, 26, 31, 32, 36, 41, 46, 50, 51, or 54 nucleotides 3′ to the last nucleotide of the second complementarity domain that is complementary to its corresponding nucleotide of the first complementarity domain.

[0379] In certain embodiments, the sequence from (a), (b), and/or (c) has at least 50%, 60%, 70%, 75%, 80%, 85%, 90%, 95%, or 99% homology with the corresponding sequence of a naturally occurring gRNA, or with a gRNA described herein.

[0380] In certain embodiments, the proximal and tail domain, when taken together, comprise at least 15, 18, 20, 25, 30, 31, 35, 40, 45, 49, 50, or 53 nucleotides.

[0381] In certain embodiments, there are at least 15, 18, 20, 25, 30, 31, 35, 40, 45, 49, 50, or 53 nucleotides 3′ to the last nucleotide of the second complementarity domain.

[0382] In certain embodiments, there are at least 16, 19, 21, 26, 31, 32, 36, 41, 46, 50, 51, or 54 nucleotides 3′ to the last nucleotide of the second complementarity domain that are complementary to the corresponding nucleotides of the first complementarity domain.

[0383] In certain embodiments, the targeting domain consists of, consists essentially of, or comprises 16, 17, 18, 19, 20, 21, 22, 23, 24, 25, or 26 nucleotides (e.g., 16, 17, 18, 19, 20, 21, 22, 23, 24, 25, or 26 consecutive nucleotides) complementary or partially complementary to the target domain or a portion thereof, e.g., the targeting domain is 16, 17, 18, 19, 20, 21, 22, 23, 24, 25, or 26 nucleotides in length. In certain of these embodiments, the targeting domain is complementary to the target domain over the entire length of the targeting domain, the entire length of the target domain, or both.

[0384] In certain embodiments, a unimolecular or chimeric gRNA molecule disclosed herein (comprising a targeting domain, a first complementary domain, a linking domain, a second complementarity domain, a proximal domain and, optionally, a tail domain) comprises the nucleotide sequence set forth in SEQ ID NO:42, wherein the targeting domain is listed as 20 Ns (residues 1-20) but may range in length from 16 to 26 nucleotides and wherein the final six residues (residues 97-102) represent a termination signal for the U6 promoter but may be absent or fewer in number. In certain embodiments, the unimolecular, or chimeric, gRNA molecule is a S. pyogenes gRNA molecule.

[0385] In certain embodiments, a unimolecular or chimeric gRNA molecule disclosed herein (comprising a targeting domain, a first complementarity domain, a linking domain, a second complementarity domain, a proximal domain and, optionally, a tail domain) comprises the nucleotide sequence set forth in SEQ ID NO:38, wherein the targeting domain is listed as 20 Ns (residues 1-20) but may range in length from 16 to 26 nucleotides, and wherein the final six residues (residues 97-102) represent a termination signal for the U6 promoter but may be absent or fewer in number. In certain embodiments, the unimolecular or chimeric gRNA molecule is an S. aureus gRNA molecule.

[0386] The sequences and structures of exemplary chimeric gRNAs are also shown in FIGS. 1H-1I.

Exemplary Modular gRNAs

[0387] In certain embodiments, a modular gRNA disclosed herein comprises:
[0388] a first strand comprising, preferably from 5′ to 3′;
   [0389] a targeting domain, e.g., comprising 15, 16, 17, 18, 19, 20, 21, 22, 23, 24, 25, or 26 nucleotides;
   [0390] a first complementarity domain; and
[0391] a second strand, comprising, preferably from 5′ to 3′:
   [0392] optionally a 5′ extension domain;
   [0393] a second complementarity domain;
   [0394] a proximal domain; and
   [0395] a tail domain,
wherein:
[0396] (a) the proximal and tail domain, when taken together, comprise at least 15, 18, 20, 25, 30, 31, 35, 40, 45, 49, 50, or 53 nucleotides;
[0397] (b) there are at least 15, 18, 20, 25, 30, 31, 35, 40, 45, 49, 50, or 53 nucleotides 3′ to the last nucleotide of the second complementarity domain; or
[0398] (c) there are at least 16, 19, 21, 26, 31, 32, 36, 41, 46, 50, 51, or 54 nucleotides 3′ to the last nucleotide of the second complementarity domain that is complementary to its corresponding nucleotide of the first complementarity domain.

[0399] In certain embodiments, the sequence from (a), (b), or (c), has at least 60, 75, 80, 85, 90, 95, or 99% homology with the corresponding sequence of a naturally occurring gRNA, or with a gRNA described herein.

[0400] In certain embodiments, the proximal and tail domain, when taken together, comprise at least 15, 18, 20, 25, 30, 31, 35, 40, 45, 49, 50, or 53 nucleotides.

[0401] In certain embodiments, there are at least 15, 18, 20, 25, 30, 31, 35, 40, 45, 49, 50, or 53 nucleotides 3′ to the last nucleotide of the second complementarity domain.

[0402] In certain embodiments, there are at least 16, 19, 21, 26, 31, 32, 36, 41, 46, 50, 51, or 54 nucleotides 3′ to the last nucleotide of the second complementarity domain that is complementary to its corresponding nucleotide of the first complementarity domain.

[0403] In certain embodiments, the targeting domain comprises, has, or consists of, 16, 17, 18, 19, 20, 21, 22, 23, 24, 25, or 26 nucleotides (e.g., 16, 17, 18, 19, 20, 21, 22, 23, 24, 25, or 26 consecutive nucleotides) having complementarity with the target domain, e.g., the targeting domain is 16, 17, 18, 19, 20, 21, 22, 23, 24, 25, or 26 nucleotides in length.

[0404] In certain embodiments, the targeting domain consists of, consists essentially of, or comprises 16, 17, 18, 19, 20, 21, 22, 23, 24, 25, or 26 nucleotides (e.g., 16, 17, 18, 19, 20, 21, 22, 23, 24, 25, or 26 consecutive nucleotides) complementary to the target domain or a portion thereof. In certain of these embodiments, the targeting domain is complementary to the target domain over the entire length of the targeting domain, the entire length of the target domain, or both.

[0405] In certain embodiments, the targeting domain comprises, consists of, or consists essentially of 16 nucleotides (e.g., 16 consecutive nucleotides) having complementarity with the target domain, e.g., the targeting domain is 16 nucleotides in length. In certain embodiments of these embodiments, (a) the proximal and tail domain, when taken together, comprise at least 15, 18, 20, 25, 30, 31, 35, 40, 45, 49, 50, or 53 nucleotides; (b) there are at least 15, 18, 20, 25, 30, 31, 35, 40, 45, 49, 50, or 53 nucleotides 3′ to the last nucleotide of the second complementarity domain; and/or (c) there are at least 16, 19, 21, 26, 31, 32, 36, 41, 46, 50, 51, or 54 nucleotides 3′ to the last nucleotide of the second complementarity domain that is complementary to its corresponding nucleotide of the first complementarity domain.

[0406] In certain embodiments, the targeting domain comprises, consists of, or consists essentially of 17 nucleotides (e.g., 17 consecutive nucleotides) having complementarity with the target domain, e.g., the targeting domain is 17 nucleotides in length. In certain of these embodiments, (a) the proximal and tail domain, when taken together, comprise at least 15, 18, 20, 25, 30, 31, 35, 40, 45, 49, 50, or 53 nucleotides; (b) there are at least 15, 18, 20, 25, 30, 31, 35, 40, 45, 49, 50, or 53 nucleotides 3′ to the last nucleotide of the second complementarity domain; and/or (c) there are at least 16, 19, 21, 26, 31, 32, 36, 41, 46, 50, 51, or 54 nucleotides 3′ to the last nucleotide of the second complementarity domain that is complementary to its corresponding nucleotide of the first complementarity domain.

[0407] In certain embodiments, the targeting domain comprises, consists of, or consists essentially of 18 nucleotides (e.g., 18 consecutive nucleotides) having complementarity with the target domain, e.g., the targeting domain is 18 nucleotides in length. In certain of these embodiments, (a) the proximal and tail domain, when taken together, comprise at least 15, 18, 20, 25, 30, 31, 35, 40, 45, 49, 50, or 53 nucleotides; (b) there are at least 15, 18, 20, 25, 30, 31, 35, 40, 45, 49, 50, or 53 nucleotides 3′ to the last nucleotide of the second complementarity domain; and/or (c) there are at least 16, 19, 21, 26, 31, 32, 36, 41, 46, 50, 51, or 54 nucleotides 3′ to the last nucleotide of the second complementarity domain that is complementary to its corresponding nucleotide of the first complementarity domain.

[0408] In certain embodiments, the targeting domain comprises, consists of, or consists essentially of 19 nucleotides (e.g., 19 consecutive nucleotides) having complementarity with the target domain, e.g., the targeting domain is 19 nucleotides in length. In certain of these embodiments, (a) the proximal and tail domain, when taken together, comprise at least 15, 18, 20, 25, 30, 31, 35, 40, 45, 49, 50, or 53 nucleotides; (b) there are at least 15, 18, 20, 25, 30, 31, 35, 40, 45, 49, 50, or 53 nucleotides 3′ to the last nucleotide of the second complementarity domain; and/or (c) there are at least 16, 19, 21, 26, 31, 32, 36, 41, 46, 50, 51, or 54 nucleotides 3′ to the last nucleotide of the second complementarity domain that is complementary to its corresponding nucleotide of the first complementarity domain.

[0409] In certain embodiments, the targeting domain comprises, consists of, or consists essentially of 20 nucleotides (e.g., 20 consecutive nucleotides) having complementarity with the target domain, e.g., the targeting domain is 20 nucleotides in length. In certain of these embodiments, (a) the proximal and tail domain, when taken together, comprise at least 15, 18, 20, 25, 30, 31, 35, 40, 45, 49, 50, or 53 nucleotides; (b) there are at least 15, 18, 20, 25, 30, 31, 35, 40, 45, 49, 50, or 53 nucleotides 3′ to the last nucleotide of the second complementarity domain; and/or (c) there are at least 16, 19, 21, 26, 31, 32, 36, 41, 46, 50, 51, or 54 nucleotides 3′ to the last nucleotide of the second complementarity domain that is complementary to its corresponding nucleotide of the first complementarity domain.

[0410] In certain embodiments, the targeting domain comprises, consists of, or consists essentially of 21 nucleotides (e.g., 21 consecutive nucleotides) having complementarity with the target domain, e.g., the targeting domain is 21 nucleotides in length. In certain of these embodiments, (a) the proximal and tail domain, when taken together, comprise at least 15, 18, 20, 25, 30, 31, 35, 40, 45, 49, 50, or 53 nucleotides; (b) there are at least 15, 18, 20, 25, 30, 31, 35, 40, 45, 49, 50, or 53 nucleotides 3′ to the last nucleotide of the second complementarity domain; and/or (c) there are at least 16, 19, 21, 26, 31, 32, 36, 41, 46, 50, 51, or 54 nucleotides 3′ to the last nucleotide of the second complementarity domain that is complementary to its corresponding nucleotide of the first complementarity domain.

[0411] In certain embodiments, the targeting domain comprises, consists of, or consists essentially of 22 nucleotides (e.g., 22 consecutive nucleotides) having complementarity with the target domain, e.g., the targeting domain is 22 nucleotides in length. In certain of these embodiments, (a) the proximal and tail domain, when taken together, comprise at least 15, 18, 20, 25, 30, 31, 35, 40, 45, 49, 50, or 53 nucleotides; (b) there are at least 15, 18, 20, 25, 30, 31, 35, 40, 45, 49, 50, or 53 nucleotides 3′ to the last nucleotide of the second complementarity domain; and/or (c) there are at least 16, 19, 21, 26, 31, 32, 36, 41, 46, 50, 51, or 54 nucleotides 3′ to the last nucleotide of the second complementarity domain that is complementary to its corresponding nucleotide of the first complementarity domain.

[0412] In certain embodiments, the targeting domain comprises, consists of, or consists essentially of 23 nucleotides (e.g., 23 consecutive nucleotides) having complementarity with the target domain, e.g., the targeting domain is 23 nucleotides in length. In certain of these embodiments, (a) the proximal and tail domain, when taken together, comprise at least 15, 18, 20, 25, 30, 31, 35, 40, 45, 49, 50, or 53 nucleotides; (b) there are at least 15, 18, 20, 25, 30, 31, 35, 40, 45, 49, 50, or 53 nucleotides 3′ to the last nucleotide of the second complementarity domain; and/or (c) there are at least 16, 19, 21, 26, 31, 32, 36, 41, 46, 50, 51, or 54 nucleotides 3′ to the last nucleotide of the second complementarity domain that is complementary to its corresponding nucleotide of the first complementarity domain.

[0413] In certain embodiments, the targeting domain comprises, consists of, or consists essentially of 24 nucleotides (e.g., 24 consecutive nucleotides) having complementarity with the target domain, e.g., the targeting domain is 24 nucleotides in length. In certain of these embodiments, (a) the proximal and tail domain, when taken together, comprise at least 15, 18, 20, 25, 30, 31, 35, 40, 45, 49, 50, or 53 nucleotides; (b) there are at least 15, 18, 20, 25, 30, 31, 35, 40, 45, 49, 50, or 53 nucleotides 3′ to the last nucleotide of the second complementarity domain; and/or (c) there are at least 16, 19, 21, 26, 31, 32, 36, 41, 46, 50, 51, or 54 nucleotides 3′ to the last nucleotide of the second complementarity domain that is complementary to its corresponding nucleotide of the first complementarity domain.

[0414] In certain embodiments, the targeting domain comprises, consists of, or consists essentially of 25 nucleotides (e.g., 25 consecutive nucleotides) having complementarity with the target domain, e.g., the targeting domain is 25 nucleotides in length. In certain of these embodiments, (a) the proximal and tail domain, when taken together, comprise at least 15, 18, 20, 25, 30, 31, 35, 40, 45, 49, 50, or 53 nucleotides; (b) there are at least 15, 18, 20, 25, 30, 31, 35, 40, 45, 49, 50, or 53 nucleotides 3′ to the last nucleotide of the second complementarity domain; and/or (c) there are at least 16, 19, 21, 26, 31, 32, 36, 41, 46, 50, 51, or 54 nucleotides 3′ to the last nucleotide of the second complementarity domain that is complementary to its corresponding nucleotide of the first complementarity domain.

[0415] In certain embodiments, the targeting domain comprises, consists of, or consists essentially of 26 nucleotides (e.g., 26 consecutive nucleotides) having complementarity with the target domain, e.g., the targeting domain is 26 nucleotides in length. In certain of these embodiments, (a) the proximal and tail domain, when taken together, comprise at least 15, 18, 20, 25, 30, 31, 35, 40, 45, 49, 50, or 53 nucleotides; (b) there are at least 15, 18, 20, 25, 30, 31, 35, 40, 45, 49, 50, or 53 nucleotides 3′ to the last nucleotide of the second complementarity domain; and/or there are at least 16, 19, 21, 26, 31, 32, 36, 41, 46, 50, 51, or 54 nucleotides 3′ to the last nucleotide of the second complementarity domain that is complementary to its corresponding nucleotide of the first complementarity domain.

gRNA Delivery

[0416] In certain embodiments of the methods provided herein, the methods comprise delivery of one or more (e.g., two, three, or four) gRNA molecules as described herein. In certain of these embodiments, the gRNA molecules are delivered by intrahepatic injection, intraparenchymal injection into liver, intraparenchymal injection into the lung, intravenous delivery into the portal vein, intravenous injection, intramuscular injection, subcutaneous injection, or inhalation.

Methods for Designing gRNAs

[0417] Methods for selecting, designing, and validating targeting domains for use in the gRNAs described herein are provided. Exemplary targeting domains for incorporation into gRNAs are also provided herein. It is contemplated herein that in certain embodiments the targeting domain hybridizes to the target domain through complementary base pairing.

[0418] Methods for selection and validation of target sequences as well as off-target analyses have been described previously (see, e.g., Mali 2013; Hsu 2013; Fu 2014; Heigwer 2014; Bae 2014; Xiao 2014). For example, a software tool can be used to optimize the choice of potential targeting domains corresponding to a user's target sequence, e.g., to minimize total off-target activity across the genome. Off-target activity may be other than cleavage. For each possible targeting domain choice using S. pyogenes Cas9, the tool can identify all off-target sequences (preceding either NAG or NGG PAMs) across the genome that contain up to certain number (e.g., 1, 2, 3, 4, 5, 6, 7, 8, 9, or 10) of mismatched base-pairs. The cleavage efficiency at each off-target sequence can be predicted, e.g., using an experimentally-derived weighting scheme. Each possible targeting domain is then ranked according to its total predicted off-target cleavage; the top-ranked targeting domains represent those that are likely to have the greatest on-target cleavage and the least off-target cleavage. Other functions, e.g., automated reagent design for CRISPR construction, primer design for the on-target Surveyor assay, and primer design for high-throughput detection and quantification of off-target cleavage via next-gen sequencing, can also be included in the tool. Candidate targeting domains and gRNAs comprising those targeting domains can be functionally evaluated using methods known in the art and/or as set forth herein.

[0419] As a non-limiting example, targeting domains for use in gRNAs for use with S. pyogenes and S. aureus Cas9s were identified using a DNA sequence searching algorithm. 17-mer and 20-mer targeting domains were designed for S. pyogenes targets, while 18-mer, 19-mer, 20-mer, 21-mer, 22-mer, 23-mer, and 24-mer targeting domains were designed for S. aureus targets. gRNA design was carried out using custom gRNA design software based on the public tool cas-offinder (Bae 2014). This software scores guides after calculating their genome-wide off-target propensity. Typically matches ranging from perfect matches to 7 mismatches are considered for guides ranging in length from 17 to 24. Once the off-target sites are computationally determined, an aggregate score is calculated for each guide and summarized in a tabular output using a web-interface. In addition to identifying potential target sites adjacent to PAM sequences, the software also identifies all PAM adjacent sequences that differ by 1, 2, 3, or more than 3 nucleotides from the selected target sites. Genomic DNA sequences for SERPINA1 were obtained from the UCSC Genome browser and sequences were screened for repeat elements using the publically available RepeatMasker program. RepeatMasker searches input DNA sequences for repeated elements and regions of low complexity. The output is a detailed annotation of the repeats present in a given query sequence.

[0420] Following identification, targeting domain were ranked into tiers based on their orthogonality and the presence of a 5′ G (based on identification of close matches in the human genome containing a relevant PAM, e.g., an NGG PAM for S. pyogenes, or an NNGRRT (SEQ ID NO:204) or NNGRRV (SEQ ID NO:205) PAM for S. aureus). Orthogonality refers to the number of sequences in the human genome that contain a minimum number of mismatches to the target sequence. A “high level of orthogonality” or “good orthogonality” may, for example, refer to 20-mer targeting domain that have no identical sequences in the human genome besides the intended target, nor any sequences that contain one or two mismatches in the target sequence.

[0421] Targeting domains with good orthogonality are selected to minimize off-target DNA cleavage.

[0422] Targeting domains were identified for both single-gRNA nuclease cleavage and for a dual-gRNA paired “nickase” strategy. Criteria for selecting targeting domains and the determination of which targeting domains can be used for the dual-gRNA paired “nickase” strategy is based on two considerations:
[0423] (1) Targeting domain pairs should be oriented on the DNA such that PAMs are facing out and cutting with the D10A Cas9 nickase will result in 5′ overhangs; and
[0424] (2) An assumption that cleaving with dual nickase pairs will result in deletion of the entire intervening sequence at a reasonable frequency. However, cleaving with dual nickase pairs can also result in indel mutations at the site of only one of the gRNAs. Candidate pair members can be tested for how efficiently they remove the entire sequence versus causing indel mutations at the target site of one targeting domain.

### Targeting Domains for Use in Knocking in the Correct Nucleotide at the Z Allele in SERPINA1 Using HDR (Approach 1A)

[0425] Targeting domains for use in gRNAs for knocking in the correct nucleotide at the Z mutation in SERPINA1 using HDR in conjunction with the methods disclosed herein (e.g., Approach 1A) were identified and ranked into four tiers for S. pyogenes and five tiers for S. aureus. In each case, targeting domains were designed to bind within the sequence spanning 200 bp upstream and 200 bp downstream of the Z mutation (i.e., from nucleotides 13790 to 14190 in SEQ ID NO:2231).

[0426] For S. pyogenes, tier 1 targeting domains were selected based on (1) high level of orthogonality and (2) presence of 5′ G. Tier 2 targeting domains were selected based on (1) high level of orthogonality. Tier 3 targeting domains were selected based on (1) presence of 5′ G. Tier 4 targeting domains were selected based on their ability to bind within the region spanning 200 bp upstream and 200 bp downstream of the Z mutation (i.e., from nucleotides 13790 to 14190 in SEQ ID NO:2231).

[0427] For S. aureus, tier 1 targeting domains were selected based on (1) high level of orthogonality, (2) presence of 5′ G, and (3) PAM sequence NNGRRT (SEQ ID NO:204). Tier 2 targeting domains were selected based on (1) high level of orthogonality and (2) PAM sequence NNGRRT (SEQ ID NO:204). Tier 3 targeting domains were selected based on (1) presence of 5′ G and (2) PAM sequence NNGRRT (SEQ ID NO:204). Tier 4 targeting domains were selected based on (1) PAM sequence NNGRRT (SEQ ID NO:204). Tier 5 targeting domains were selected based on (1) PAM sequence NNGRRV (SEQ ID NO:205).

[0428] Note that tiers are non-inclusive (each targeting domain is listed only once for the strategy). The identified targeting domains are summarized in Table 6.

TABLE 6
Nucleotide sequences of S. pyogenes and S. aureus
targeting domains for use in Approach 1A

| | S. pyogenes | S. aureus |
|---|---|---|
| Tier 1 | SEQ ID NOs: 253-262 | SEQ ID NOs: 402-412 |
| Tier 2 | SEQ ID NOs: 263-275 | SEQ ID NOs: 272, 413-438 |
| Tier 3 | SEQ ID NOs: 276-310 | SEQ ID NOs: 306, 439-445 |
| Tier 4 | SEQ ID NOs: 311-401 | SEQ ID NOs: 382, 392, |
| | | 446-460 |
| Tier 5 | NA | SEQ ID NOs: 255, 257, |
| | | 258, 260, 261, 265, 268, |
| | | 271, 274, 295, 298, 300, |
| | | 301, 302, 308, 309, 371, |
| | | 374, 375, 377, 384, 385, |
| | | 388, 389, 393, 395, 397, |
| | | 461-883, 2191, 2192 |

### Targeting Domains for Use in Knocking Out the Z Allele in SERPINA1 by Targeting Exon IV or V Using NHEJ (Approach 1B)

[0429] Targeting domains for use in gRNAs for knocking out the Z mutant allele of SERPINA1 in conjunction with the methods disclosed herein targeting either Exon IV or Exon V (e.g., Approach 1B) were identified and ranked into four tiers for S. pyogenes and five tiers for S. aureus. Targeting domains for use in targeting Exon IV were designed to bind within the sequence spanning the Exon IV coding sequence and up to 30 bp upstream or downstream thereof (i.e., from nucleotides 12959 to 13166 in SEQ ID NO:2231). Targeting domains for use in targeting Exon V were designed to bind within the sequencing spanning the Exon V coding sequence and up to 30 bp upstream thereof (i.e., from nucleotides 13930 to 14151 in SEQ ID NO:2231).

[0430] For S. pyogenes, tier 1 targeting domains were selected based on (1) high level of orthogonality and (2) presence of 5′ G. Tier 2 targeting domains were selected based on (1) high level of orthogonality. Tier 3 targeting domains were selected based on (1) presence of 5′ G. Tier 4 targeting domains for use in targeting Exon IV were selected based on their ability to bind within the Exon IV coding sequence and/or up to 30 bp upstream or downstream of the Exon IV coding sequence (i.e., from nucleotides 12959 to 13166 in SEQ ID NO:2231). Tier 4 targeting domains for use in targeting Exon V were selected based on their ability to bind within the Exon V coding sequence and/or up to 30 bp upstream of the Exon V coding sequence (i.e., from nucleotides 13930 to 14151 in SEQ ID NO:2231).

[0431] For S. aureus, tier 1 targeting domains were selected based on (1) high level of orthogonality, (2) presence of 5′ G, and (3) PAM sequence NNGRRT (SEQ ID NO:204). Tier 2 targeting domains were selected based on (1) high level of orthogonality and (2) PAM sequence NNGRRT (SEQ ID NO:204). Tier 3 targeting domains were selected based on (1) presence of 5′ G and (2) PAM sequence NNGRRT (SEQ ID NO:204). Tier 4 targeting domains were selected based on (1) PAM sequence NNGRRT (SEQ ID NO:204). Tier 5 targeting domains were selected based on (1) PAM sequence NNGRRV (SEQ ID NO:205).

[0432] Note that tiers are non-inclusive (each targeting domain is listed only once for the strategy). The identified targeting domains for targeting Exons IV and V are summarized in Tables 7 and 8, respectively.

TABLE 7
Nucleotide sequences of S. pyogenes and S. aureus targeting
domains for use in Approach 1B targeting Exon IV

| | S. pyogenes | S. aureus |
|---|---|---|
| Tier 1 | SEQ ID NOs: 884 | SEQ ID NOs: 944-949 |
| Tier 2 | SEQ ID NOs: 885-892 | SEQ ID NOs: 935, 950-964 |
| Tier 3 | SEQ ID NOs: 893-904 | SEQ ID NOs: 965, 966 |
| Tier 4 | SEQ ID NOs: 905-943 | SEQ ID NOs: 936, 967-969 |
| Tier 5 | NA | SEQ ID NOs: 886, 901, |
| | | 931, 937, 943, 970-1139 |

TABLE 8
Nucleotide sequences of S. pyogenes and S. aureus
targeting domains for use in Approach 1B targeting Exon V

| | S. pyogenes | S. aureus |
|---|---|---|
| Tier 1 | SEQ ID NOs: 253, | SEQ ID NOs: 402-406 |
| | 254, 256-258, 260 | |
| Tier 2 | SEQ ID NOs: 265, | SEQ ID NOs: 272, 413- |
| | 266, 270-275 | 420, 435-438 |
| Tier 3 | SEQ ID NOs: 282, | SEQ ID NO: 439 |
| | 290, 295, 297, 301, | |
| | 307, 309 | |
| Tier 4 | SEQ ID NOs: 311- | SEQ ID NOs: 446-451, |
| | 316, 320-323, 325, | 458-460 |
| | 326, 332, 334, 336- | |
| | 340, 344, 345, 347, | |
| | 348, 352, 353, 356, | |
| | 357, 361-364, 366, | |
| | 368-370, 374-376, | |
| | 383, 385, 387-389, | |
| | 391, 395, 396, 398 | |
| Tier 5 | NA | SEQ ID NOs: 257, 258, |
| | | 260, 265, 271, 274, 295, |
| | | 301, 309, 374, 375, 385, |
| | | 388, 389, 395, 461-473, |
| | | 481-493, 501-507, 521- |
| | | 527, 535-540, 555-611, |
| | | 615-620, 628-641, 648- |
| | | 667, 671-676, 689-708, |
| | | 722-728, 743-749, 756- |
| | | 762, 789-794, 816-822, |
| | | 851-857, 865-870, |
| | | 877-883 |

### Targeting Domains for Use in Knocking Out the S Allele, Z Allele, or Other Mutant Alleles in SERPINA1 by Targeting an Early Coding Region Using NHEJ (Approaches 2A and 2B)

[0433] Targeting domains for use in gRNAs for knocking out the S allele, Z allele, or another mutant allele of SERPINA1 in conjunction with the methods disclosed herein targeting an early coding region of SERPINA1 (e.g., Approaches 2A, 2B) were identified and ranked into four tiers for S. pyogenes and five tiers for S. aureus. In each case, targeting domains were designed to bind within the sequence spanning the first coding exon of SERPINA1 (i.e., Exon II) and 30 bp upstream or downstream thereof (i.e., from nucleotides 9329 to 9643 in SEQ ID NO:2231).

[0434] For S. pyogenes, tier 1 targeting domains were selected based on (1) high level of orthogonality and (2) presence of 5′ G. Tier 2 targeting domains were selected based on (1) high level of orthogonality. Tier 3 targeting domains were selected based on (1) presence of 5′ G. Tier 4 targeting domains were selected based on their ability to bind within the sequence spanning the first coding exon of SERPINA1 (i.e., Exon II) and 30 bp upstream or downstream thereof (i.e., from nucleotides 9329 to 9643 in SEQ ID NO:2231).

[0435] For S. aureus, tier 1 targeting domains were selected based on (1) high level of orthogonality, (2) presence of 5′ G, and (3) PAM sequence NNGRRT (SEQ ID NO:204). Tier 2 targeting domains were selected based on (1) high level of orthogonality and (2) PAM sequence NNGRRT (SEQ ID NO:204). Tier 3 targeting domains were selected based on (1) presence of 5′ G and (2) PAM sequence NNGRRT (SEQ ID NO:204). Tier 4 targeting domains were selected based on (1) PAM sequence NNGRRT (SEQ ID NO:204). Tier 5 targeting domains were selected based on (1) PAM sequence NNGRRV (SEQ ID NO:205).

[0436] Note that tiers are non-inclusive (each targeting domain is listed only once for the strategy). The identified targeting domains are summarized in Table 9.

TABLE 9
Nucleotide sequences of S. pyogenes and S. aureus
targeting domains for use in Approaches 2A and 2B

| | S. pyogenes | S. aureus |
|---|---|---|
| Tier 1 | SEQ ID NOs: 1140-1147 | SEQ ID NOs: 1374-1404 |
| Tier 2 | SEQ ID NOs: 1148-1165 | SEQ ID NOs: 1165, |
| | | 1349, 1359, 1362, |
| | | 1405-1480 |
| Tier 3 | SEQ ID NOs: 1166-1233 | SEQ ID NOs: 1481-1499 |
| Tier 4 | SEQ ID NOs: 1234-1373 | SEQ ID NOs: 1371, |
| | | 1500-1522 |
| Tier 5 | NA | SEQ ID NOs: 1141, |
| | | 1143, 1147, 1153, 1156, |
| | | 1158, 1160, 1317, |
| | | 1320-1323, 1325, 1329, |
| | | 1333, 1336-1338, 1340, |
| | | 1342, 1343, 1352, 1365, |
| | | 1368, 1370, 1523-2190 |

[0437] In certain embodiments, two or more (e.g., three or four) gRNA molecules are used with one RNA-guided nuclease (e.g., Cas9 molecule). In another embodiment, when two or more (e.g., three or four) gRNAs are used with two or more RNA-guided nucleases (e.g., Cas9 molecules), at least one RNA-guided nuclease (e.g., Cas9 molecule) is from a different species than the other RNA-guided nuclease(s) (e.g., Cas9 molecule(s)). For example, when two gRNA molecules are used with two RNA-guided nucleases (e.g., Cas9 molecules), one RNA-guided nuclease (e.g., Cas9 molecule) can be from one species and the other RNA-guided nuclease (e.g., Cas9 molecule) can be from a different species. Both RNA-guided nuclease (e.g., Cas9 molecule) species are used to generate a single or double-strand break, as desired.

[0438] Any of the targeting domains in Tables 6-9 can be used in conjunction with an S. pyogenes or S. aureus Cas9 nickase molecule to generate a single-strand break, or with an RNA-guided nuclease (e.g., a Cas9 molecule) to generate a double-strand break.

[0439] When two gRNAs are designed for use with two RNA-guided nucleases (e.g., Cas9 molecules), the two RNA-guided nucleases (e.g., Cas9 molecules) may be different species. Both RNA-guided nuclease (e.g., Cas9 molecule) species may be used to generate a single or double-strand break, as desired.

[0440] It is contemplated herein that any upstream gRNA described herein may be paired with any downstream gRNA described herein. When an upstream gRNA designed for use with one species of RNA-guided nuclease (e.g., Cas9) is paired with a downstream gRNA designed for use from a different species of RNA-guided nuclease (e.g., Cas9 molecule), both RNA-guided nuclease (e.g., Cas9 molecule) species are used to generate a single or double-strand break, as desired.

### RNA-Guided Nucleases

[0441] RNA-guided nucleases according to the present disclosure include, but are not limited to, naturally-occurring Class 2 CRISPR nucleases such as Cas9, and Cpf1, as well as other nucleases derived or obtained therefrom. In functional terms, RNA-guided nucleases are defined as those nucleases that: (a) interact with (e.g., complex with) a gRNA; and (b) together with the gRNA, associate with, and optionally cleave or modify, a target region of a DNA that includes (i) a sequence complementary to the targeting domain of the gRNA and, optionally, (ii) a PAM. RNA-guided nucleases can be defined, in broad terms, by their PAM specificity and cleavage activity, even though variations may exist between individual RNA-guided nucleases that share the same PAM specificity or cleavage activity. Skilled artisans will appreciate that some aspects of the present disclosure relate to systems, methods and compositions that can be implemented using any suitable RNA-guided nuclease having a certain PAM specificity and/or cleavage activity. For this reason, unless otherwise specified, the term RNA-guided nuclease should be understood as a generic term, and not limited to any particular type (e.g., Cas9 vs. Cpf1), species (e.g., S. pyogenes vs. S. aureus) or variation (e.g., full-length vs. truncated or split; naturally-occurring PAM specificity vs. engineered PAM specificity, etc.) of RNA-guided nuclease.

[0442] The PAM sequence takes its name from its sequential relationship to the “protospacer” sequence that is complementary to gRNA targeting domains (or “spacers”). Together with protospacer sequences, PAM sequences define target regions or sequences for specific RNA-guided nuclease/gRNA combinations.

[0443] Various RNA-guided nucleases may require different sequential relationships between PAMs and protospacers. In general, Cas9s recognize PAM sequences that are 3′ of the protospacer as visualized relative to the top or complementary strand:
[0444] 5′---------[protospacer]----------------------------3′
[0445] 3′-----------------------------------[PAM]-------------------5′
   Cpf1, on the other hand, generally recognizes PAM sequences that are 5′ of the protospacer:
[0446] 5′-----------------------------[protospacer]------------------3′
[0447] 3′--------------------[PAM]-----------------------------------5′

[0448] In addition to recognizing specific sequential orientations of PAMs and protospacers, RNA-guided nucleases can also recognize specific PAM sequences. S. aureus Cas9, for instance, recognizes a PAM sequence of NNGRRT or NNGRRV, wherein the N residues are immediately 3′ of the region recognized by the gRNA targeting domain. S. pyogenes Cas9 recognizes NGG PAM sequences. And F. novicida Cpf1 recognizes a TTN PAM sequence. PAM sequences have been identified for a variety of RNA-guided nucleases, and a strategy for identifying novel PAM sequences has been described by Shmakov 2015. It should also be noted that engineered RNA-guided nucleases can have PAM specificities that differ from the PAM specificities of reference molecules (for instance, in the case of an engineered RNA-guided nuclease, the reference molecule may be the naturally occurring variant from which the RNA-guided nuclease is derived, or the naturally occurring variant having the greatest amino acid sequence homology to the engineered RNA-guided nuclease).

[0449] In addition to their PAM specificity, RNA-guided nucleases can be characterized by their DNA cleavage activity: naturally-occurring RNA-guided nucleases typically form DSBs in target nucleic acids, but engineered variants have been produced that generate only SSBs (discussed above) Ran 2013, incorporated by reference herein), or that that do not cut at all.

### Cas9 Molecules

[0450] Cas9 molecules of a variety of species can be used in the methods and compositions described herein. While S. pyogenes, S. aureus, and S. thermophilus Cas9 molecules are the subject of much of the disclosure herein, Cas9 molecules of, derived from, or based on the Cas9 proteins of other species listed herein can be used as well. These include, for example, Cas9 molecules from Acidovorax avenae, Actinobacillus pleuropneumoniae, Actinobacillus succinogenes, Actinobacillus suis, Actinomyces sp., Cycliphilus denitrificans, Aminomonas paucivorans, Bacillus cereus, Bacillus smithii, Bacillus thuringiensis, Bacteroides sp., Blastopirellula marina, Bradyrhizobium sp., Brevibacillus laterosporus, Campylobacter coli, Campylobacter jejuni, Campylobacter lari, Candidatus Puniceispirillum, Clostridium cellulolyticum, Clostridium perfringens, Corynebacterium accolens, Corynebacterium diphtheria, Corynebacterium matruchotii, Dinoroseobacter shibae, Eubacterium dolichum, Gamma proteobacterium, Gluconacetobacter diazotrophicus, Haemophilus parainfluenzae, Haemophilus sputorum, Helicobacter canadensis, Helicobacter cinaedi, Helicobacter mustelae, Ilyobacter polytropus, Kingella kingae, Lactobacillus crispatus, Listeria ivanovii, Listeria monocytogenes, Listeriaceae bacterium, Methylocystis sp., Methylosinus trichosporium, Mobiluncus mulieris, Neisseria bacilliformis, Neisseria cinerea, Neisseria flavescens, Neisseria lactamica, Neisseria sp., Neisseria wadsworthii, Nitrosomonas sp., Parvibaculum lavamentivorans, Pasteurella multocida, Phascolarctobacterium succinatutens, Ralstonia syzygii, Rhodopseudomonas palustris, Rhodovulum sp., Simonsiella muelleri, Sphingomonas sp., Sporolactobacillus vineae, Staphylococcus lugdunensis, Streptococcus sp., Subdoligranulum sp., Tistrella mobilis, Treponema sp., or Verminephrobacter eiseniae.

### Cas9 Domains

[0451] Crystal structures have been determined for two different naturally occurring bacterial Cas9 molecules (Jinek 2014) and for S. pyogenes Cas9 with a guide RNA (e.g., a synthetic fusion of crRNA and tracrRNA) (Nishimasu 2014; Anders 2014).

[0452] A naturally occurring Cas9 molecule comprises two lobes: a recognition (REC) lobe and a nuclease (NUC) lobe; each of which further comprise domains described herein. FIGS. 8A-8B provide a schematic of the organization of important Cas9 domains in the primary structure. The domain nomenclature and the numbering of the amino acid residues encompassed by each domain used throughout this disclosure is as described previously (Nishimasu 2014). The numbering of the amino acid residues is with reference to Cas9 from S. pyogenes.

[0453] The REC lobe comprises the arginine-rich bridge helix (BH), the REC1 domain, and the REC2 domain. The REC lobe does not share structural similarity with other known proteins, indicating that it is a Cas9-specific functional domain. The BH domain is a long a helix and arginine rich region and comprises amino acids 60-93 of S. pyogenes Cas9 (SEQ ID NO:2). The REC1 domain is important for recognition of the repeat:anti-repeat duplex, e.g., of a gRNA or a tracrRNA, and is therefore critical for Cas9 activity by recognizing the target sequence. The REC1 domain comprises two REC1 motifs at amino acids 94 to 179 and 308 to 717 of S. pyogenes Cas9 (SEQ ID NO:2). These two REC1 domains, though separated by the REC2 domain in the linear primary structure, assemble in the tertiary structure to form the REC1 domain. The REC2 domain, or parts thereof, may also play a role in the recognition of the repeat:anti-repeat duplex. The REC2 domain comprises amino acids 180-307 of S. pyogenes Cas9 (SEQ ID NO:2).

[0454] The NUC lobe comprises the RuvC domain, the HNH domain, and the PAM-interacting (PI) domain. The RuvC domain shares structural similarity to retroviral integrase superfamily members and cleaves a single strand, e.g., the non-complementary strand of the target nucleic acid molecule. The RuvC domain is assembled from the three split RuvC motifs (RuvCI, RuvCII, and RuvCIII, which are often commonly referred to in the art as RuvCI domain or N-terminal RuvC domain, RuvCII domain, and RuvCIII domain, respectively) at amino acids 1-59, 718-769, and 909-1098, respectively, of S. pyogenes Cas9 (SEQ ID NO:2). Similar to the REC1 domain, the three RuvC motifs are linearly separated by other domains in the primary structure. However, in the tertiary structure, the three RuvC motifs assemble and form the RuvC domain. The HNH domain shares structural similarity with HNH endonucleases and cleaves a single strand, e.g., the complementary strand of the target nucleic acid molecule. The HNH domain lies between the RuvC II-III motifs and comprises amino acids 775-908 of S. pyogenes Cas9 (SEQ ID NO:2). The PI domain interacts with the PAM of the target nucleic acid molecule, and comprises amino acids 1099-1368 of S. pyogenes Cas9 (SEQ ID NO:2).

### RuvC-Like Domain and HNH-Like Domain

[0455] In certain embodiments, a Cas9 molecule or Cas9 polypeptide comprises an HNH-like domain and a RuvC-like domain, and in certain of these embodiments cleavage activity is dependent on the RuvC-like domain and the HNH-like domain. A Cas9 molecule or Cas9 polypeptide can comprise one or more of a RuvC-like domain and an HNH-like domain. In certain embodiments, a Cas9 molecule or Cas9 polypeptide comprises a RuvC-like domain, e.g., a RuvC-like domain described below, and/or an HNH-like domain, e.g., an HNH-like domain described below.

### RuvC-Like Domains

[0456] In certain embodiments, a RuvC-like domain cleaves a single strand, e.g., the non-complementary strand of the target nucleic acid molecule. The Cas9 molecule or Cas9 polypeptide can include more than one RuvC-like domain (e.g., one, two, three or more RuvC-like domains). In certain embodiments, a RuvC-like domain is at least 5, 6, 7, 8 amino acids in length but not more than 20, 19, 18, 17, 16 or 15 amino acids in length. In certain embodiments, the Cas9 molecule or Cas9 polypeptide comprises an N-terminal RuvC-like domain of about 10 to 20 amino acids, e.g., about 15 amino acids in length.

### N-Terminal RuvC-Like Domains

[0457] Some naturally occurring Cas9 molecules comprise more than one RuvC-like domain with cleavage being dependent on the N-terminal RuvC-like domain. Accordingly, a Cas9 molecule or Cas9 polypeptide can comprise an N-terminal RuvC-like domain. Exemplary N-terminal RuvC-like domains are described below.

[0458] In certain embodiments, a Cas9 molecule or Cas9 polypeptide comprises an N-terminal RuvC-like domain comprising an amino acid sequence of Formula I:

(SEQ ID NO: 20)
D-X₁-G-X₂-X₃-X₄-X₅-G-X₆-X₇-X₈-X₉,

[0459] wherein
[0460] X₁ is selected from I, V, M, L, and T (e.g., selected from I, V, and L);
[0461] X₂ is selected from T, I, V, S, N, Y, E, and L (e.g., selected from T, V, and I);
[0462] X₃ is selected from N, S, G, A, D, T, R, M, and F (e.g., A or N);
[0463] X₄ is selected from S, Y, N, and F (e.g., S);
[0464] X₅ is selected from V, I, L, C, T, and F (e.g., selected from V, I and L);
[0465] X₆ is selected from W, F, V, Y, S, and L (e.g., W);
[0466] X₇ is selected from A, S, C, V, and G (e.g., selected from A and S);
[0467] X₈ is selected from V, I, L, A, M, and H (e.g., selected from V, I, M and L); and
[0468] X₉ is selected from any amino acid or is absent (e.g., selected from T, V, I, L, A, F, S, A, Y, M, and R, or, e.g., selected from T, V, I, L, and Δ).

[0469] In certain embodiments, the N-terminal RuvC-like domain differs from a sequence of SEQ ID NO:20 by as many as 1 but no more than 2, 3, 4, or 5 residues.

[0470] In certain embodiments, the N-terminal RuvC-like domain is cleavage competent. In other embodiments, the N-terminal RuvC-like domain is cleavage incompetent.

[0471] In certain embodiments, a Cas9 molecule or Cas9 polypeptide comprises an N-terminal RuvC-like domain comprising an amino acid sequence of Formula II:

(SEQ ID NO: 21),
D-X₁-G-X₂-X₃-S-X₅-G-X₆-X₇-X₈-X₉,

[0472] wherein
[0473] X₁ is selected from I, V, M, L, and T (e.g., selected from I, V, and L);
[0474] X₂ is selected from T, I, V, S, N, Y, E, and L (e.g., selected from T, V, and I);
[0475] X₃ is selected from N, S, G, A, D, T, R, M and F (e.g., A or N);
[0476] X₅ is selected from V, I, L, C, T, and F (e.g., selected from V, I and L);
[0477] X₆ is selected from W, F, V, Y, S, and L (e.g., W);
[0478] X₇ is selected from A, S, C, V, and G (e.g., selected from A and S);
[0479] X₈ is selected from V, I, L, A, M, and H (e.g., selected from V, I, M and L); and
[0480] X₉ is selected from any amino acid or is absent (e.g., selected from T, V, I, L, A, F, S, A, Y, M, and R or selected from e.g., T, V, I, L, and Δ).

[0481] In certain embodiments, the N-terminal RuvC-like domain differs from a sequence of SEQ ID NO:21 by as many as 1 but not more than 2, 3, 4, or 5 residues.

[0482] In certain embodiments, the N-terminal RuvC-like domain comprises an amino acid sequence of Formula III:

(SEQ ID NO: 22)
D-I-G-X₂-X₃-S-V-G-W-A-X₈-X₉,

[0483] wherein
[0484] X₂ is selected from T, I, V, S, N, Y, E, and L (e.g., selected from T, V, and I);
[0485] X₃ is selected from N, S, G, A, D, T, R, M, and F (e.g., A or N);
[0486] X₈ is selected from V, I, L, A, M, and H (e.g., selected from V, I, M and L); and
[0487] X₉ is selected from any amino acid or is absent (e.g., selected from T, V, I, L, A, F, S, A, Y, M, and R or selected from e.g., T, V, I, L, and Δ).

[0488] In certain embodiments, the N-terminal RuvC-like domain differs from a sequence of SEQ ID NO:22 by as many as 1 but not more than, 2, 3, 4, or 5 residues.

[0489] In certain embodiments, the N-terminal RuvC-like domain comprises an amino acid sequence of Formula IV:

(SEQ ID NO: 23)
D-I-G-T-N-S-V-G-W-A-V-X,

[0490] wherein
[0491] X is a non-polar alkyl amino acid or a hydroxyl amino acid, e.g., X is selected from V, I, L, and T (e.g., the Cas9 molecule can comprise an N-terminal RuvC-like domain shown in FIGS. 2A-2G (depicted as Y)).

[0492] In certain embodiments, the N-terminal RuvC-like domain differs from a sequence of SEQ ID NO:23 by as many as 1 but not more than, 2, 3, 4, or 5 residues.

[0493] In certain embodiments, the N-terminal RuvC-like domain differs from a sequence of an N-terminal RuvC like domain disclosed herein, e.g., in FIGS. 3A-3B, as many as 1 but no more than 2, 3, 4, or 5 residues. In an embodiment, 1, 2, 3 or all of the highly conserved residues identified in FIGS. 3A-3B are present.

[0494] In certain embodiments, the N-terminal RuvC-like domain differs from a sequence of an N-terminal RuvC-like domain disclosed herein, e.g., in FIGS. 4A-4B, as many as 1 but no more than 2, 3, 4, or 5 residues. In an embodiment, 1, 2, or all of the highly conserved residues identified in FIGS. 4A-4B are present.

### Additional RuvC-Like Domains

[0495] In addition to the N-terminal RuvC-like domain, the Cas9 molecule or Cas9 polypeptide can comprise one or more additional RuvC-like domains. In certain embodiments, the Cas9 molecule or Cas9 polypeptide can comprise two additional RuvC-like domains. Preferably, the additional RuvC-like domain is at least 5 amino acids in length and, e.g., less than 15 amino acids in length, e.g., 5 to 10 amino acids in length, e.g., 8 amino acids in length.

[0496] An additional RuvC-like domain can comprise an amino acid sequence of Formula V:

(SEQ ID NO: 15)
I-X₁-X₂-E-X₃-A-R-E,

[0497] wherein
[0498] X₁ is V or H;
[0499] X₂ is I, L or V (e.g., I or V); and
[0500] X₃ is M or T.

[0501] In certain embodiments, the additional RuvC-like domain comprises an amino acid sequence of Formula VI:

(SEQ ID NO: 16)
I-V-X₂-E-M-A-R-E,

[0502] wherein
[0503] X₂ is I, L or V (e.g., I or V) (e.g., the Cas9 molecule or Cas9 polypeptide can comprise an additional RuvC-like domain shown in FIG. 2A-2G (depicted as B)).

[0504] An additional RuvC-like domain can comprise an amino acid sequence of Formula VII:

(SEQ ID NO: 17)
H-H-A-X₁-D-A-X₂-X₃,

[0505] wherein
[0506] X₁ is H or L;
[0507] X₂ is R or V; and
[0508] X₃ is E or V.

[0509] In certain embodiments, the additional RuvC-like domain comprises the amino acid sequence: H-H-A-H-D-A-Y-L (SEQ ID NO:18).

[0510] In certain embodiments, the additional RuvC-like domain differs from a sequence of SEQ ID NOs:15-18 by as many as 1 but not more than 2, 3, 4, or 5 residues.

[0511] In certain embodiments, the sequence flanking the N-terminal RuvC-like domain has the amino acid sequence of Formula VIII:

(SEQ ID NO: 19)
K-X₁′-Y-X₂′-X₃′-X₄′-Z-T-D-X₉′-Y,

[0512] wherein
[0513] X₁′ is selected from K and P;
[0514] X₂′ is selected from V, L, I, and F (e.g., V, I and L);
[0515] X₃′ is selected from G, A and S (e.g., G);
[0516] X₄′ is selected from L, I, V, and F (e.g., L);
[0517] X₉′ is selected from D, E, N, and Q; and
[0518] Z is an N-terminal RuvC-like domain, e.g., as described above.

### HNH-Like Domains

[0519] In certain embodiments, an HNH-like domain cleaves a single stranded complementary domain, e.g., a complementary strand of a double stranded nucleic acid molecule. In certain embodiments, an HNH-like domain is at least 15, 20, or 25 amino acids in length but not more than 40, 35, or 30 amino acids in length, e.g., 20 to 35 amino acids in length, e.g., 25 to 30 amino acids in length. Exemplary HNH-like domains are described below.

[0520] In an embodiment, a Cas9 molecule or Cas9 polypeptide comprises an HNH-like domain having an amino acid sequence of Formula IX:

(SEQ ID NO: 25)
X₁-X₂-X₃-H-X₄-X₅-P-X₆-X₇-X₈-X⁹-X¹⁰-X¹¹-X¹²-X¹³-X¹⁴-
X¹⁵-N-X¹⁶-X¹⁷-X¹⁸-X¹⁹-X₂₀-X₂₁-X₂₂-X₂₃-N,

[0521] wherein
[0522] X₁ is selected from D, E, Q, and N (e.g., D and E);
[0523] X₂ is selected from L, I, R, Q, V, M, and K;
[0524] X₃ is selected from D and E;
[0525] X₄ is selected from I, V, T, A, and L (e.g., A, I, and V);
[0526] X₅ is selected from V, Y, I, L, F, and W (e.g., V, I, and L);
[0527] X₆ is selected from Q, H, R, K, Y, I, L, F, and W;
[0528] X₇ is selected from S, A, D, T, and K (e.g., S and A);
[0529] X₈ is selected from F, L, V, K, Y, M, I, R, A, E, D, and Q (e.g., F);
[0530] X₉ is selected from L, R, T, I, V, S, C, Y, K, F, and G;
[0531] X₁₀ is selected from K, Q, Y, T, F, L, W, M, A, E, G, and S;
[0532] X₁₁ is selected from D, S, N, R, L, and T (e.g., D);
[0533] X₁₂ is selected from D, N and S;
[0534] X₁₃ is selected from S, A, T, G, and R (e.g., S);
[0535] X₁₄ is selected from I, L, F, S, R, Y, Q, W, D, K, and H (e.g., I, L, and F);
[0536] X₁₅ is selected from D, S, I, N, E, A, H, F, L, Q, M, G, Y, and V;
[0537] X₁₆ is selected from K, L, R, M, T, and F (e.g., L, R, and K);
[0538] X₁₇ is selected from V, L, I, A, and T;
[0539] X₁₈ is selected from L, I, V, and A (e.g., L and I);
[0540] X₁₉ is selected from T, V, C, E, S, and A (e.g., T and V);
[0541] X₂₀ is selected from R, F, T, W, E, L, N, C, K, V, S, Q, I, Y, H, and A;
[0542] X₂₁ is selected from S, P, R, K, N, A, H, Q, G, and L;
[0543] X₂₂ is selected from D, G, T, N, S, K, A, I, E, L, Q, R, and Y; and
[0544] X₂₃ is selected from K, V, A, E, Y, I, C, L, S, T, G, K, M, D, and F.

[0545] In certain embodiments, a HNH-like domain differs from a sequence of SEQ ID NO:25 by at least one but not more than, 2, 3, 4, or 5 residues.

[0546] In certain embodiments, the HNH-like domain is cleavage competent. In other embodiments, the HNH-like domain is cleavage incompetent.

[0547] In certain embodiments, a Cas9 molecule or Cas9 polypeptide comprises an HNH-like domain comprising an amino acid sequence of Formula X:

(SEQ ID NO: 26)
X₁-X₂-X₃-H-X₄-X₅-P-X₆-S-X₈-X₉-X₁₀-D-D-S-X₁₄-X₁₅-
N-K-V-L-X₁₉-X₂₀-X₂₁-X₂₂-X₂₃-N,

[0548] wherein
[0549] X₁ is selected from D and E;
[0550] X₂ is selected from L, I, R, Q, V, M, and K;
[0551] X₃ is selected from D and E;
[0552] X₄ is selected from I, V, T, A, and L (e.g., A, I, and V);
[0553] X₅ is selected from V, Y, I, L, F, and W (e.g., V, I, and L);
[0554] X₆ is selected from Q, H, R, K, Y, I, L, F, and W;
[0555] X₈ is selected from F, L, V, K, Y, M, I, R, A, E, D, and Q (e.g., F);
[0556] X₉ is selected from L, R, T, I, V, S, C, Y, K, F, and G;
[0557] X₁₀ is selected from K, Q, Y, T, F, L, W, M, A, E, G, and S;
[0558] X₁₄ is selected from I, L, F, S, R, Y, Q, W, D, K, and H (e.g., I, L, and F);
[0559] X₁₅ is selected from D, S, I, N, E, A, H, F, L, Q, M, G, Y, and V;
[0560] X₁₉ is selected from T, V, C, E, S, and A (e.g., T and V);
[0561] X₂₀ is selected from R, F, T, W, E, L, N, C, K, V, S, Q, I, Y, H, and A;
[0562] X₂₁ is selected from S, P, R, K, N, A, H, Q, G, and L;
[0563] X₂₂ is selected from D, G, T, N, S, K, A, I, E, L, Q, R, and Y; and
[0564] X₂₃ is selected from K, V, A, E, Y, I, C, L, S, T, G, K, M, D, and F.

[0565] In certain embodiments, the HNH-like domain differs from a sequence of SEQ ID NO:26 by 1, 2, 3, 4, or 5 residues.

[0566] In certain embodiments, a Cas9 molecule or Cas9 polypeptide comprises an HNH-like domain comprising an amino acid sequence of Formula XI:

(SEQ ID NO: 27)
X₁-V-X₃-H-I-V-P-X₆-S-X₈-X₉-X₁₀-D-D-S-X₁₄-X₁₅-N-
K-V-L-T-X₂₀-X₂₁-X₂₂-X₂₃-N,

[0567] wherein
[0568] X₁ is selected from D and E;
[0569] X₃ is selected from D and E;
[0570] X₆ is selected from Q, H, R, K, Y, I, L, and W;
[0571] X₈ is selected from F, L, V, K, Y, M, I, R, A, E, D, and Q (e.g., F);
[0572] X₉ is selected from L, R, T, I, V, S, C, Y, K, F, and G;
[0573] X₁₀ is selected from K, Q, Y, T, F, L, W, M, A, E, G, and S;
[0574] X₁₄ is selected from I, L, F, S, R, Y, Q, W, D, K, and H (e.g., I, L, and F);
[0575] X₁₅ is selected from D, S, I, N, E, A, H, F, L, Q, M, G, Y, and V;
[0576] X₂₀ is selected from R, F, T, W, E, L, N, C, K, V, S, Q, I, Y, H, and A;
[0577] X₂₁ is selected from S, P, R, K, N, A, H, Q, G, and L;
[0578] X₂₂ is selected from D, G, T, N, S, K, A, I, E, L, Q, R, and Y; and
[0579] X₂₃ is selected from K, V, A, E, Y, I, C, L, S, T, G, K, M, D, and F.

[0580] In certain embodiments, the HNH-like domain differs from a sequence of SEQ ID NO:27 by 1, 2, 3, 4, or 5 residues.

[0581] In certain embodiments, a Cas9 molecule or Cas9 polypeptide comprises an HNH-like domain having an amino acid sequence of Formula XII:

(SEQ ID NO: 28)
D-X₂-D-H-I-X₅-P-Q-X₇-F-X₉-X₁₀-D-X₁₂-S-I-D-N-X₁₆-
V-L-X₁₉-X₂₀-S-X₂₂-X₂₃-N,

[0582] wherein
[0583] X₂ is selected from I and V;
[0584] X₅ is selected from I and V;
[0585] X₇ is selected from A and S;
[0586] X₉ is selected from I and L;
[0587] X₁₀ is selected from K and T;
[0588] X₁₂ is selected from D and N;
[0589] X₁₆ is selected from R, K, and L;
[0590] X₁₉ is selected from T and V;
[0591] X₂₀ is selected from S, and R;
[0592] X₂₂ is selected from K, D, and A; and
[0593] X₂₃ is selected from E, K, G, and N (e.g., the Cas₉ molecule or Cas₉ polypeptide can comprise an HNH-like domain as described herein).

[0594] In an embodiment, the HNH-like domain differs from a sequence of SEQ ID NO:28 by as many as 1 but no more than 2, 3, 4, or 5 residues.

[0595] In certain embodiments, a Cas9 molecule or Cas9 polypeptide comprises the amino acid sequence of Formula XIII:

(SEQ ID NO: 24)
L-Y-Y-L-Q-N-G-X₁′-D-M-Y-X₂′-X₃′-X₄′-X₅′-L-D-I-
X₆′-X₇′-L-S-X₈′-Y-Z-N-R-X₉′-K-X₁₀′-D-X₁₁′-V-P,

[0596] wherein
[0597] X₁′ is selected from K and R;
[0598] X₂′ is selected from V and T;
[0599] X₃′ is selected from G and D;
[0600] X₄′ is selected from E, Q and D;
[0601] X₅′ is selected from E and D;
[0602] X₆′ is selected from D, N, and H;
[0603] X₇′ is selected from Y, R, and N;
[0604] X₈′ is selected from Q, D, and N;
[0605] X₉′ is selected from G and E;
[0606] X₁₀′ is selected from S and G;
[0607] X₁₁′ is selected from D and N; and
[0608] Z is an HNH-like domain, e.g., as described above.

[0609] In certain embodiments, the Cas9 molecule or Cas9 polypeptide comprises an amino acid sequence that differs from a sequence of SEQ ID NO:24 by as many as 1 but not more than 2, 3, 4, or 5 residues.

[0610] In certain embodiments, the HNH-like domain differs from a sequence of an HNH-like domain disclosed herein, e.g., in FIGS. 5A-5C, by as many as 1 but not more than 2, 3, 4, or 5 residues. In certain embodiments, 1 or both of the highly conserved residues identified in FIGS. 5A-5C are present.

[0611] In certain embodiments, the HNH-like domain differs from a sequence of an HNH-like domain disclosed herein, e.g., in FIGS. 6A-6B, by as many as 1 but not more than 2, 3, 4, or 5 residues. In an embodiment, 1, 2, or all 3 of the highly conserved residues identified in FIGS. 6A-6B are present.

### Cas9 Activities

[0612] In certain embodiments, the Cas9 molecule or Cas9 polypeptide is capable of cleaving a target nucleic acid molecule. Typically, wild-type Cas9 molecules cleave both strands of a target nucleic acid molecule. Cas9 molecules and Cas9 polypeptides can be engineered to alter nuclease cleavage (or other properties), e.g., to provide a Cas9 molecule or Cas9 polypeptide which is a nickase, or which lacks the ability to cleave target nucleic acid. A Cas9 molecule or Cas9 polypeptide that is capable of cleaving a target nucleic acid molecule is referred to herein as an eaCas9 (an enzymatically active Cas9) molecule or eaCas9 polypeptide.

[0613] In certain embodiments, an eaCas9 molecule or eaCas9 polypeptide comprises one or more of the following enzymatic activities:
[0614] (1) nickase activity, i.e., the ability to cleave a single strand, e.g., the non-complementary strand or the complementary strand, of a nucleic acid molecule;
[0615] (2) double stranded nuclease activity, i.e., the ability to cleave both strands of a double stranded nucleic acid and create a double stranded break, which in an embodiment is the presence of two nickase activities;
[0616] (3) endonuclease activity;
[0617] (4) exonuclease activity; and
[0618] (5) helicase activity, i.e., the ability to unwind the helical structure of a double stranded nucleic acid.

[0619] In certain embodiments, an eaCas9 molecule or eaCas9 polypeptide cleaves both DNA strands and results in a double stranded break. In certain embodiments, an eaCas9 molecule or eaCas9 polypeptide cleaves only one strand, e.g., the strand to which the gRNA hybridizes to, or the strand complementary to the strand the gRNA hybridizes with. In an embodiment, an eaCas9 molecule or eaCas9 polypeptide comprises cleavage activity associated with an HNH domain. In an embodiment, an eaCas9 molecule or eaCas9 polypeptide comprises cleavage activity associated with a RuvC domain. In an embodiment, an eaCas9 molecule or eaCas9 polypeptide comprises cleavage activity associated with an HNH domain and cleavage activity associated with a RuvC domain. In an embodiment, an eaCas9 molecule or eaCas9 polypeptide comprises an active, or cleavage competent, HNH domain and an inactive, or cleavage incompetent, RuvC domain. In an embodiment, an eaCas9 molecule or eaCas9 polypeptide comprises an inactive, or cleavage incompetent, HNH domain and an active, or cleavage competent, RuvC domain.

### Targeting and PAMs

[0620] A Cas9 molecule or Cas9 polypeptide can interact with a gRNA molecule and, in concert with the gRNA molecule, localize to a site which comprises a target domain, and in certain embodiments, a PAM sequence.

[0621] In certain embodiments, the ability of an eaCas9 molecule or eaCas9 polypeptide to interact with and cleave a target nucleic acid is PAM sequence dependent. A PAM sequence is a sequence in the target nucleic acid. In an embodiment, cleavage of the target nucleic acid occurs upstream from the PAM sequence. EaCas9 molecules from different bacterial species can recognize different sequence motifs (e.g., PAM sequences). In an embodiment, an eaCas9 molecule of S. pyogenes recognizes the sequence motif NGG and directs cleavage of a target nucleic acid sequence 1 to 10, e.g., 3 to 5, bp upstream from that sequence (see, e.g., Mali 2013). In an embodiment, an eaCas9 molecule of S. thermophilus recognizes the sequence motif NGGNG (SEQ ID NO:199) and/or NNAGAAW (N=any nucleotide, W=A or T) (SEQ ID NO:200) and directs cleavage of a target nucleic acid sequence 1 to 10, e.g., 3 to 5, bp upstream from these sequences (see, e.g., Horvath 2010; Deveau 2008). In an embodiment, an eaCas9 molecule of S. mutans recognizes the sequence motif NGG and/or NAAR (R=A or G) (SEQ ID NO:201) and directs cleavage of a target nucleic acid sequence 1 to 10, e.g., 3 to 5 bp, upstream from this sequence (see, e.g., Deveau 2008). In an embodiment, an eaCas9 molecule of S. aureus recognizes the sequence motif NNGRR (R=A or G) (SEQ ID NO:202) and directs cleavage of a target nucleic acid sequence 1 to 10, e.g., 3 to 5, bp upstream from that sequence. In an embodiment, an eaCas9 molecule of S. aureus recognizes the sequence motif NNGRRN (R=A or G) (SEQ ID NO:203) and directs cleavage of a target nucleic acid sequence 1 to 10, e.g., 3 to 5, bp upstream from that sequence. In an embodiment, an eaCas9 molecule of S. aureus recognizes the sequence motif NNGRRT (R=A or G) (SEQ ID NO:204) and directs cleavage of a target nucleic acid sequence 1 to 10, e.g., 3 to 5, bp upstream from that sequence. In an embodiment, an eaCas9 molecule of S. aureus recognizes the sequence motif NNGRRV (R=A or G, V=A, G, or C) (SEQ ID NO:205) and directs cleavage of a target nucleic acid sequence 1 to 10, e.g., 3 to 5, bp upstream from that sequence. The ability of a Cas9 molecule to recognize a PAM sequence can be determined, e.g., using a transformation assay as described previously (Jinek 2012). In each of the aforementioned embodiments (i.e., SEQ ID NOs:199-205), N can be any nucleotide residue, e.g., any of A, G, C, or T.

[0622] As is discussed herein, Cas9 molecules can be engineered to alter the PAM specificity of the Cas9 molecule.

[0623] Exemplary naturally occurring Cas9 molecules have been described previously (see, e.g., Chylinski 2013). Such Cas9 molecules include Cas9 molecules of a cluster 1 bacterial family, cluster 2 bacterial family, cluster 3 bacterial family, cluster 4 bacterial family, cluster 5 bacterial family, cluster 6 bacterial family, a cluster 7 bacterial family, a cluster 8 bacterial family, a cluster 9 bacterial family, a cluster 10 bacterial family, a cluster 11 bacterial family, a cluster 12 bacterial family, a cluster 13 bacterial family, a cluster 14 bacterial family, a cluster 15 bacterial family, a cluster 16 bacterial family, a cluster 17 bacterial family, a cluster 18 bacterial family, a cluster 19 bacterial family, a cluster 20 bacterial family, a cluster 21 bacterial family, a cluster 22 bacterial family, a cluster 23 bacterial family, a cluster 24 bacterial family, a cluster 25 bacterial family, a cluster 26 bacterial family, a cluster 27 bacterial family, a cluster 28 bacterial family, a cluster 29 bacterial family, a cluster 30 bacterial family, a cluster 31 bacterial family, a cluster 32 bacterial family, a cluster 33 bacterial family, a cluster 34 bacterial family, a cluster 35 bacterial family, a cluster 36 bacterial family, a cluster 37 bacterial family, a cluster 38 bacterial family, a cluster 39 bacterial family, a cluster 40 bacterial family, a cluster 41 bacterial family, a cluster 42 bacterial family, a cluster 43 bacterial family, a cluster 44 bacterial family, a cluster 45 bacterial family, a cluster 46 bacterial family, a cluster 47 bacterial family, a cluster 48 bacterial family, a cluster 49 bacterial family, a cluster 50 bacterial family, a cluster 51 bacterial family, a cluster 52 bacterial family, a cluster 53 bacterial family, a cluster 54 bacterial family, a cluster 55 bacterial family, a cluster 56 bacterial family, a cluster 57 bacterial family, a cluster 58 bacterial family, a cluster 59 bacterial family, a cluster 60 bacterial family, a cluster 61 bacterial family, a cluster 62 bacterial family, a cluster 63 bacterial family, a cluster 64 bacterial family, a cluster 65 bacterial family, a cluster 66 bacterial family, a cluster 67 bacterial family, a cluster 68 bacterial family, a cluster 69 bacterial family, a cluster 70 bacterial family, a cluster 71 bacterial family, a cluster 72 bacterial family, a cluster 73 bacterial family, a cluster 74 bacterial family, a cluster 75 bacterial family, a cluster 76 bacterial family, a cluster 77 bacterial family, or a cluster 78 bacterial family.

[0624] Exemplary naturally occurring Cas9 molecules include a Cas9 molecule of a cluster 1 bacterial family. Examples include a Cas9 molecule of: S. aureus, S. pyogenes (e.g., strains SF370, MGAS10270, MGAS10750, MGAS2096, MGAS315, MGAS5005, MGAS6180, MGAS9429, NZ131, SSI-1), S. thermophilus (e.g., strain LMD-9), S. pseudoporcinus (e.g., strain SPIN 20026), S. mutans (e.g., strains UA159, NN2025), S. macacae (e.g., strain NCTC11558), S. gallolyticus (e.g., strains UCN34, ATCC BAA-2069), S. equines (e.g., strains ATCC 9812, MGCS 124), S. dysdalactiae (e.g., strain GGS 124), S. bovis (e.g., strain ATCC 700338), S. anginosus (e.g., strain F0211), S. agalactiae (e.g., strains NEM316, A909), Listeria monocytogenes (e.g., strain F6854), Listeria innocua (L. innocua, e.g., strain Clip11262), Enterococcus italicus (e.g., strain DSM 15952), or Enterococcus faecium (e.g., strain 1,231,408).

[0625] In certain embodiments, a Cas9 molecule or Cas9 polypeptide comprises an amino acid sequence:
[0626] having 60%, 65%, 70%, 75%, 80%, 85%, 90%, 95%, 96%, 97%, 98%, or 99% homology with;
[0627] differs at no more than, 2, 5, 10, 15, 20, 30, or 40% of the amino acid residues when compared with;
[0628] differs by at least 1, 2, 5, 10, or 20 amino acids, but by no more than 100, 80, 70, 60, 50, 40, or 30 amino acids from; or
[0629] identical to any Cas9 molecule sequence described herein, or to a naturally occurring Cas9 molecule sequence, e.g., a Cas9 molecule from a species listed herein (e.g., SEQ ID NOs:1, 2, 4-6, or 12) or described in Chylinski 2013. In an embodiment, the Cas9 molecule or Cas9 polypeptide comprises one or more of the following activities: a nickase activity; a double stranded cleavage activity (e.g., an endonuclease and/or exonuclease activity); a helicase activity; or the ability, together with a gRNA molecule, to localize to a target nucleic acid.

[0630] In certain embodiments, a Cas9 molecule or Cas9 polypeptide comprises any of the amino acid sequence of the consensus sequence of FIGS. 2A-2G, wherein “*” indicates any amino acid found in the corresponding position in the amino acid sequence of a Cas9 molecule of S. pyogenes, S. thermophilus, S. mutans, or L. innocua, and “−” indicates absent. In an embodiment, a Cas9 molecule or Cas9 polypeptide differs from the sequence of the consensus sequence disclosed in FIGS. 2A-2G by at least 1, but no more than 2, 3, 4, 5, 6, 7, 8, 9, or 10 amino acid residues. In certain embodiments, a Cas9 molecule or Cas9 polypeptide comprises the amino acid sequence of SEQ ID NO:2. In other embodiments, a Cas9 molecule or Cas9 polypeptide differs from the sequence of SEQ ID NO:2 by at least 1, but no more than 2, 3, 4, 5, 6, 7, 8, 9, or 10 amino acid residues.

[0631] A comparison of the sequence of a number of Cas9 molecules indicate that certain regions are conserved. These are identified below as:
[0632] region 1 (residues 1 to 180, or in the case of region 1′ residues 120 to 180) region 2 (residues 360 to 480);
[0633] region 3 (residues 660 to 720);
[0634] region 4 (residues 817 to 900); and
[0635] region 5 (residues 900 to 960).

[0636] In certain embodiments, a Cas9 molecule or Cas9 polypeptide comprises regions 1-5, together with sufficient additional Cas9 molecule sequence to provide a biologically active molecule, e.g., a Cas9 molecule having at least one activity described herein. In certain embodiments, regions 1-5 each independently have 50%, 60%, 70%, 80%, 85%, 90%, 95%, 96%, 97%, 98%, or 99% homology with the corresponding residues of a Cas9 molecule or Cas9 polypeptide described herein, e.g., a sequence from FIGS. 2A-2G (SEQ ID NOs:1, 2, 4, 5, 14).

[0637] In certain embodiments, a Cas9 molecule or Cas9 polypeptide comprises an amino acid sequence referred to as region 1:
[0638] having 50%, 60%, 70%, 80%, 85%, 90%, 95%, 96%, 97%, 98%, or 99% homology with amino acids 1-180 (the numbering is according to the motif sequence in FIG. 2; 52% of residues in the four Cas9 sequences in FIGS. 2A-2G are conserved) of the amino acid sequence of Cas9 of S. pyogenes (SEQ ID NO:2);
[0639] differs by at least 1, 2, 5, 10 or 20 amino acids but by no more than 90, 80, 70, 60, 50, 40, or 30 amino acids from amino acids 1-180 of the amino acid sequence of Cas9 of S. pyogenes, S. thermophilus, S. mutans, or Listeria innocua (SEQ ID NOs:2, 4, 1, and 5, respectively); or
[0640] is identical to amino acids 1-180 of the amino acid sequence of Cas9 of S. pyogenes, S. thermophilus, S. mutans, or L. innocua (SEQ ID NOs:2, 4, 1, and 5, respectively).

[0641] In certain embodiments, a Cas9 molecule or Cas9 polypeptide comprises an amino acid sequence referred to as region 1′:
[0642] having 55%, 60%, 65%, 70%, 75%, 80%, 85%, 90%, 95%, 96%, 97%, 98%, or 99% homology with amino acids 120-180 (55% of residues in the four Cas9 sequences in FIG. 2 are conserved) of the amino acid sequence of Cas9 of S. pyogenes, S. thermophilus, S. mutans, or L innocua (SEQ ID NOs:2, 4, 1, and 5, respectively);
[0643] differs by at least 1, 2, or 5 amino acids but by no more than 35, 30, 25, 20, or 10 amino acids from amino acids 120-180 of the amino acid sequence of Cas9 of S. pyogenes, S. thermophilus, S. mutans, or L innocua (SEQ ID NOs:2, 4, 1, and 5, respectively); or
[0644] is identical to amino acids 120-180 of the amino acid sequence of Cas9 of S. pyogenes, S. thermophilus, S. mutans, or L innocua (SEQ ID NOs:2, 4, 1, and 5, respectively).

[0645] In certain embodiments, a Cas9 molecule or Cas9 polypeptide comprises an amino acid sequence referred to as region 2:
[0646] having 50%, 55%, 60%, 65%, 70%, 75%, 80%, 85%, 90%, 95%, 96%, 97%, 98%, or 99% homology with amino acids 360-480 (52% of residues in the four Cas9 sequences in FIG. 2 are conserved) of the amino acid sequence of Cas9 of S. pyogenes, S. thermophilus, S. mutans, or L innocua (SEQ ID NOs:2, 4, 1, and 5, respectively);
[0647] differs by at least 1, 2, or 5 amino acids but by no more than 35, 30, 25, 20, or 10 amino acids from amino acids 360-480 of the amino acid sequence of Cas9 of S. pyogenes, S. thermophilus, S. mutans, or L innocua (SEQ ID NOs:2, 4, 1, and 5, respectively); or
[0648] is identical to amino acids 360-480 of the amino acid sequence of Cas9 of S. pyogenes, S. thermophilus, S. mutans, or L innocua (SEQ ID NOs:2, 4, 1, and 5, respectively).

[0649] In certain embodiments, a Cas9 molecule or Cas9 polypeptide comprises an amino acid sequence referred to as region 3:
[0650] having 55%, 60%, 65%, 70%, 75%, 80%, 85%, 90%, 95%, 96%, 97%, 98%, or 99% homology with amino acids 660-720 (56% of residues in the four Cas9 sequences in FIG. 2 are conserved) of the amino acid sequence of Cas9 of S. pyogenes, S. thermophilus, S. mutans, or L innocua (SEQ ID NOs:2, 4, 1, and 5, respectively);
[0651] differs by at least 1, 2, or 5 amino acids but by no more than 35, 30, 25, 20, or 10 amino acids from amino acids 660-720 of the amino acid sequence of Cas9 of S. pyogenes, S. thermophilus, S. mutans, or L innocua (SEQ ID NOs:2, 4, 1, and 5, respectively); or
[0652] is identical to amino acids 660-720 of the amino acid sequence of Cas9 of S. pyogenes, S. thermophilus, S. mutans, or L innocua (SEQ ID NOs:2, 4, 1, and 5, respectively).

[0653] In certain embodiments, a Cas9 molecule or Cas9 polypeptide comprises an amino acid sequence referred to as region 4:
[0654] having 50%, 55%, 60%, 65%, 70%, 75%, 80%, 85%, 90%, 95%, 96%, 97%, 98%, or 99% homology with amino acids 817-900 (55% of residues in the four Cas9 sequences in FIGS. 2A-2G are conserved) of the amino acid sequence of Cas9 of S. pyogenes, S. thermophilus, S. mutans, or L innocua (SEQ ID NOs:2, 4, 1, and 5, respectively);
[0655] differs by at least 1, 2, or 5 amino acids but by no more than 35, 30, 25, 20, or 10 amino acids from amino acids 817-900 of the amino acid sequence of Cas9 of S. pyogenes, S. thermophilus, S. mutans, or L innocua (SEQ ID NOs:2, 4, 1, and 5, respectively); or is identical to amino acids 817-900 of the amino acid sequence of Cas9 of S. pyogenes, S. thermophilus, S. mutans, or L innocua (SEQ ID NOs:2, 4, 1, and 5, respectively).

[0656] In certain embodiments, a Cas9 molecule or Cas9 polypeptide comprises an amino acid sequence referred to as region 5:
[0657] having 50%, 55%, 60%, 65%, 70%, 75%, 80%, 85%, 90%, 95%, 96%, 97%, 98%, or 99% homology with amino acids 900-960 (60% of residues in the four Cas9 sequences in FIGS. 2A-2G are conserved) of the amino acid sequence of Cas9 of S. pyogenes, S. thermophilus, S. mutans, or L innocua (SEQ ID NOs:2, 4, 1, and 5, respectively);
[0658] differs by at least 1, 2, or 5 amino acids but by no more than 35, 30, 25, 20, or 10 amino acids from amino acids 900-960 of the amino acid sequence of Cas9 of S. pyogenes, S. thermophilus, S. mutans, or L innocua (SEQ ID NOs:2, 4, 1, and 5, respectively); or
[0659] is identical to amino acids 900-960 of the amino acid sequence of Cas9 of S. pyogenes, S. thermophilus, S. mutans, or L innocua (SEQ ID NOs:2, 4, 1, and 5, respectively).

### Engineered or Altered Cas9

[0660] Cas9 molecules and Cas9 polypeptides described herein can possess any of a number of properties, including nuclease activity (e.g., endonuclease and/or exonuclease activity); helicase activity; the ability to associate functionally with a gRNA molecule; and the ability to target (or localize to) a site on a nucleic acid (e.g., PAM recognition and specificity). In certain embodiments, a Cas9 molecule or Cas9 polypeptide can include all or a subset of these properties. In a typical embodiment, a Cas9 molecule or Cas9 polypeptide has the ability to interact with a gRNA molecule and, in concert with the gRNA molecule, localize to a site in a nucleic acid. Other activities, e.g., PAM specificity, cleavage activity, or helicase activity can vary more widely in Cas9 molecules and Cas9 polypeptides.

[0661] Cas9 molecules include engineered Cas9 molecules and engineered Cas9 polypeptides (engineered, as used in this context, means merely that the Cas9 molecule or Cas9 polypeptide differs from a reference sequences, and implies no process or origin limitation). An engineered Cas9 molecule or Cas9 polypeptide can comprise altered enzymatic properties, e.g., altered nuclease activity (as compared with a naturally occurring or other reference Cas9 molecule) or altered helicase activity. As discussed herein, an engineered Cas9 molecule or Cas9 polypeptide can have nickase activity (as opposed to double strand nuclease activity). In certain embodiments, an engineered Cas9 molecule or Cas9 polypeptide can have an alteration that alters its size, e.g., a deletion of amino acid sequence that reduces its size, e.g., without significant effect on one or more Cas9 activities. In certain embodiments, an engineered Cas9 molecule or Cas9 polypeptide can comprise an alteration that affects PAM recognition, e.g., an engineered Cas9 molecule can be altered to recognize a PAM sequence other than that recognized by the endogenous wild-type PI domain. In certain embodiments, a Cas9 molecule or Cas9 polypeptide can differ in sequence from a naturally occurring Cas9 molecule but not have significant alteration in one or more Cas9 activities.

[0662] Cas9 molecules or Cas9 polypeptides with desired properties can be made in a number of ways, e.g., by alteration of a parental, e.g., naturally occurring, Cas9 molecules or Cas9 polypeptides, to provide an altered Cas9 molecule or Cas9 polypeptide having a desired property. For example, one or more mutations or differences relative to a parental Cas9 molecule, e.g., a naturally occurring or engineered Cas9 molecule, can be introduced. Such mutations and differences comprise: substitutions (e.g., conservative substitutions or substitutions of non-essential amino acids); insertions; or deletions. In an embodiment, a Cas9 molecule or Cas9 polypeptide can comprises one or more mutations or differences, e.g., at least 1, 2, 3, 4, 5, 10, 15, 20, 30, 40, or 50 mutations but less than 200, 100, or 80 mutations relative to a reference, e.g., a parental, Cas9 molecule.

[0663] In certain embodiments, a mutation or mutations do not have a substantial effect on a Cas9 activity, e.g., a Cas9 activity described herein. In other embodiments, a mutation or mutations have a substantial effect on a Cas9 activity, e.g., a Cas9 activity described herein.

### Non-Cleaving and Modified-Cleavage Cas9

[0664] In an embodiment, a Cas9 molecule or Cas9 polypeptide comprises a cleavage property that differs from naturally occurring Cas9 molecules, e.g., that differs from the naturally occurring Cas9 molecule having the closest homology. For example, a Cas9 molecule or Cas9 polypeptide can differ from naturally occurring Cas9 molecules, e.g., a Cas9 molecule of S. pyogenes, as follows: its ability to modulate, e.g., decreased or increased, cleavage of a double stranded nucleic acid (endonuclease and/or exonuclease activity), e.g., as compared to a naturally occurring Cas9 molecule (e.g., a Cas9 molecule of S. pyogenes); its ability to modulate, e.g., decreased or increased, cleavage of a single strand of a nucleic acid, e.g., a non-complementary strand of a nucleic acid molecule or a complementary strand of a nucleic acid molecule (nickase activity), e.g., as compared to a naturally occurring Cas9 molecule (e.g., a Cas9 molecule of S. pyogenes); or the ability to cleave a nucleic acid molecule, e.g., a double stranded or single stranded nucleic acid molecule, can be eliminated.

[0665] In certain embodiments, an eaCas9 molecule or eaCas9 polypeptide comprises one or more of the following activities: cleavage activity associated with an N-terminal RuvC-like domain; cleavage activity associated with an HNH-like domain; cleavage activity associated with an HNH-like domain and cleavage activity associated with an N-terminal RuvC-like domain.

[0666] In certain embodiments, an eaCas9 molecule or eaCas9 polypeptide comprises an active, or cleavage competent, HNH-like domain (e.g., an HNH-like domain described herein, e.g., SEQ ID NOs:24-28) and an inactive, or cleavage incompetent, N-terminal RuvC-like domain. An exemplary inactive, or cleavage incompetent N-terminal RuvC-like domain can have a mutation of an aspartic acid in an N-terminal RuvC-like domain, e.g., an aspartic acid at position 9 of the consensus sequence disclosed in FIGS. 2A-2G or an aspartic acid at position 10 of SEQ ID NO:2, e.g., can be substituted with an alanine. In an embodiment, the eaCas9 molecule or eaCas9 polypeptide differs from wild-type in the N-terminal RuvC-like domain and does not cleave the target nucleic acid, or cleaves with significantly less efficiency, e.g., less than 20, 10, 5, 1, or 0.1% of the cleavage activity of a reference Cas9 molecule, e.g., as measured by an assay described herein. The reference Cas9 molecule can by a naturally occurring unmodified Cas9 molecule, e.g., a naturally occurring Cas9 molecule such as a Cas9 molecule of S. pyogenes, or S. thermophilus. In an embodiment, the reference Cas9 molecule is the naturally occurring Cas9 molecule having the closest sequence identity or homology.

[0667] In an embodiment, an eaCas9 molecule or eaCas9 polypeptide comprises an inactive, or cleavage incompetent, HNH domain and an active, or cleavage competent, N-terminal RuvC-like domain (e.g., a RuvC-like domain described herein, e.g., SEQ ID NOs:15-23). Exemplary inactive, or cleavage incompetent HNH-like domains can have a mutation at one or more of: a histidine in an HNH-like domain, e.g., a histidine shown at position 856 of the consensus sequence disclosed in FIGS. 2A-2G, e.g., can be substituted with an alanine; and one or more asparagines in an HNH-like domain, e.g., an asparagine shown at position 870 of the consensus sequence disclosed in FIGS. 2A-2G and/or at position 879 of the consensus sequence disclosed in FIGS. 2A-2G, e.g., can be substituted with an alanine. In an embodiment, the eaCas9 differs from wild-type in the HNH-like domain and does not cleave the target nucleic acid, or cleaves with significantly less efficiency, e.g., less than 20, 10, 5, 1, or 0.1% of the cleavage activity of a reference Cas9 molecule, e.g., as measured by an assay described herein. The reference Cas9 molecule can by a naturally occurring unmodified Cas9 molecule, e.g., a naturally occurring Cas9 molecule such as a Cas9 molecule of S. pyogenes or S. thermophilus. In an embodiment, the reference Cas9 molecule is the naturally occurring Cas9 molecule having the closest sequence identity or homology.

[0668] In certain embodiments, exemplary Cas9 activities comprise one or more of PAM specificity, cleavage activity, and helicase activity. A mutation(s) can be present, e.g., in: one or more RuvC domains, e.g., an N-terminal RuvC domain; an HNH domain; a region outside the RuvC domains and the HNH domain. In an embodiment, a mutation(s) is present in a RuvC domain. In an embodiment, a mutation(s) is present in an HNH domain. In an embodiment, mutations are present in both a RuvC domain and an HNH domain.

[0669] Exemplary mutations that may be made in the RuvC domain or HNH domain with reference to the S. pyogenes sequence include: D10A, E762A, H840A, N854A, N863A, and/or D986A.

[0670] Whether or not a particular sequence, e.g., a substitution, may affect one or more activity, such as targeting activity, cleavage activity, etc., can be evaluated or predicted, e.g., by evaluating whether the mutation is conservative. In an embodiment, a “non-essential” amino acid residue, as used in the context of a Cas9 molecule, is a residue that can be altered from the wild-type sequence of a Cas9 molecule, e.g., a naturally occurring Cas9 molecule, e.g., an eaCas9 molecule, without abolishing or more preferably, without substantially altering a Cas9 activity (e.g., cleavage activity), whereas changing an “essential” amino acid residue results in a substantial loss of activity (e.g., cleavage activity).

[0671] In an embodiment, a Cas9 molecule comprises a cleavage property that differs from naturally occurring Cas9 molecules, e.g., that differs from the naturally occurring Cas9 molecule having the closest homology. For example, a Cas9 molecule can differ from naturally occurring Cas9 molecules, e.g., a Cas9 molecule of S aureus, S. pyogenes, or C. jejuni as follows: its ability to modulate, e.g., decreased or increased, cleavage of a double stranded break (endonuclease and/or exonuclease activity), e.g., as compared to a naturally occurring Cas9 molecule (e.g., a Cas9 molecule of S aureus, S. pyogenes, or C. jejuni); its ability to modulate, e.g., decreased or increased, cleavage of a single strand of a nucleic acid, e.g., a non-complimentary strand of a nucleic acid molecule or a complementary strand of a nucleic acid molecule (nickase activity), e.g., as compared to a naturally occurring Cas9 molecule (e.g., a Cas9 molecule of S aureus, S. pyogenes, or C. jejuni); or the ability to cleave a nucleic acid molecule, e.g., a double stranded or single stranded nucleic acid molecule, can be eliminated.

[0672] In an embodiment, the altered Cas9 molecule is an eaCas9 molecule comprising one or more of the following activities: cleavage activity associated with a RuvC domain; cleavage activity associated with an HNH domain; cleavage activity associated with an HNH domain and cleavage activity associated with a RuvC domain.

[0673] In certain embodiments, the altered Cas9 molecule or Cas9 polypeptide comprises a sequence in which:
[0674] the sequence corresponding to the fixed sequence of the consensus sequence disclosed in FIGS. 2A-2G differs at no more than 1, 2, 3, 4, 5, 10, 15, or 20% of the fixed residues in the consensus sequence disclosed in FIGS. 2A-2G; and
[0675] the sequence corresponding to the residues identified by “*” in the consensus sequence disclosed in FIGS. 2A-2G differs at no more than 1, 2, 3, 4, 5, 10, 15, 20, 25, 30, 35, or 40% of the “*” residues from the corresponding sequence of naturally occurring Cas9 molecule, e.g., an S. pyogenes, S. thermophilus, S. mutans, or L. innocua Cas9 molecule.

[0676] In an embodiment, the altered Cas9 molecule or Cas9 polypeptide is an eaCas9 molecule or eaCas9 polypeptide comprising the amino acid sequence of S. pyogenes Cas9 disclosed in FIGS. 2A-2G (SEQ ID NO:2) with one or more amino acids that differ from the sequence of S. pyogenes (e.g., substitutions) at one or more residues (e.g., 2, 3, 5, 10, 15, 20, 30, 50, 70, 80, 90, 100, or 200 amino acid residues) represented by an “*” in the consensus sequence disclosed in FIGS. 2A-2G (SEQ ID NO:14).

[0677] In an embodiment, the altered Cas9 molecule or Cas9 polypeptide is an eaCas9 molecule or eaCas9 polypeptide comprising the amino acid sequence of S. thermophilus Cas9 disclosed in FIGS. 2A-2G (SEQ ID NO:4) with one or more amino acids that differ from the sequence of S. thermophilus (e.g., substitutions) at one or more residues (e.g., 2, 3, 5, 10, 15, 20, 30, 50, 70, 80, 90, 100, or 200 amino acid residues) represented by an “*” in the consensus sequence disclosed in FIGS. 2A-2G (SEQ ID NO:14).

[0678] In an embodiment, the altered Cas9 molecule or Cas9 polypeptide is an eaCas9 molecule or eaCas9 polypeptide comprising the amino acid sequence of S. mutans Cas9 disclosed in FIGS. 2A-2G (SEQ ID NO:1) with one or more amino acids that differ from the sequence of S. mutans (e.g., substitutions) at one or more residues (e.g., 2, 3, 5, 10, 15, 20, 30, 50, 70, 80, 90, 100, or 200 amino acid residues) represented by an “*” in the consensus sequence disclosed in FIGS. 2A-2G (SEQ ID NO:14).

[0679] In an embodiment, the altered Cas9 molecule or Cas9 polypeptide is an eaCas9 molecule or eaCas9 polypeptide comprising the amino acid sequence of L. innocua Cas9 disclosed in FIGS. 2A-2G (SEQ ID NO:5) with one or more amino acids that differ from the sequence of L. innocua (e.g., substitutions) at one or more residues (e.g., 2, 3, 5, 10, 15, 20, 30, 50, 70, 80, 90, 100, or 200 amino acid residues) represented by an “*” in the consensus sequence disclosed in FIGS. 2A-2G (SEQ ID NO:14).

[0680] In certain embodiments, the altered Cas9 molecule or Cas9 polypeptide, e.g., an eaCas9 molecule or eaCas9 polypeptide, can be a fusion, e.g., of two of more different Cas9 molecules, e.g., of two or more naturally occurring Cas9 molecules of different species. For example, a fragment of a naturally occurring Cas9 molecule of one species can be fused to a fragment of a Cas9 molecule of a second species. As an example, a fragment of a Cas9 molecule of S. pyogenes comprising an N-terminal RuvC-like domain can be fused to a fragment of Cas9 molecule of a species other than S. pyogenes (e.g., S. thermophilus) comprising an HNH-like domain.

Cas9 with Altered or No PAM Recognition

[0681] Naturally occurring Cas9 molecules can recognize specific PAM sequences, for example the PAM recognition sequences described above for, e.g., S. pyogenes, S. thermophilus, S. mutans, and S. aureus.

[0682] In certain embodiments, a Cas9 molecule or Cas9 polypeptide has the same PAM specificities as a naturally occurring Cas9 molecule. In other embodiments, a Cas9 molecule or Cas9 polypeptide has a PAM specificity not associated with a naturally occurring Cas9 molecule, or a PAM specificity not associated with the naturally occurring Cas9 molecule to which it has the closest sequence homology. For example, a naturally occurring Cas9 molecule can be altered, e.g., to alter PAM recognition, e.g., to alter the PAM sequence that the Cas9 molecule or Cas9 polypeptide recognizes in order to decrease off-target sites and/or improve specificity; or eliminate a PAM recognition requirement. In certain embodiments, a Cas9 molecule or Cas9 polypeptide can be altered, e.g., to increase length of PAM recognition sequence and/or improve Cas9 specificity to high level of identity (e.g., 98%, 99%, or 100% match between gRNA and a PAM sequence), e.g., to decrease off-target sites and/or increase specificity. In certain embodiments, the length of the PAM recognition sequence is at least 4, 5, 6, 7, 8, 9, 10, or 15 amino acids in length. In an embodiment, the Cas9 specificity requires at least 90%, 95%, 96%, 97%, 98%, 99% or more homology between the gRNA and the PAM sequence. Cas9 molecules or Cas9 polypeptides that recognize different PAM sequences and/or have reduced off-target activity can be generated using directed evolution. Exemplary methods and systems that can be used for directed evolution of Cas9 molecules are described (see, e.g., Esvelt 2011). Candidate Cas9 molecules can be evaluated, e.g., by methods described herein.

### Size-Optimized Cas9

[0683] Engineered Cas9 molecules and engineered Cas9 polypeptides described herein include a Cas9 molecule or Cas9 polypeptide comprising a deletion that reduces the size of the molecule while still retaining desired Cas9 properties, e.g., essentially native conformation, Cas9 nuclease activity, and/or target nucleic acid molecule recognition. Provided herein are Cas9 molecules or Cas9 polypeptides comprising one or more deletions and optionally one or more linkers, wherein a linker is disposed between the amino acid residues that flank the deletion. Methods for identifying suitable deletions in a reference Cas9 molecule, methods for generating Cas9 molecules with a deletion and a linker, and methods for using such Cas9 molecules will be apparent to one of ordinary skill in the art upon review of this document.

[0684] A Cas9 molecule, e.g., a S. aureus, S. pyogenes, or C. jejuni, Cas9 molecule, having a deletion is smaller, e.g., has reduced number of amino acids, than the corresponding naturally-occurring Cas9 molecule. The smaller size of the Cas9 molecules allows increased flexibility for delivery methods, and thereby increases utility for genome-editing. A Cas9 molecule can comprise one or more deletions that do not substantially affect or decrease the activity of the resultant Cas9 molecules described herein. Activities that are retained in the Cas9 molecules comprising a deletion as described herein include one or more of the following:
[0685] a nickase activity, i.e., the ability to cleave a single strand, e.g., the non-complementary strand or the complementary strand, of a nucleic acid molecule; a double stranded nuclease activity, i.e., the ability to cleave both strands of a double stranded nucleic acid and create a double stranded break, which in an embodiment is the presence of two nickase activities;
[0686] an endonuclease activity;
[0687] an exonuclease activity;
[0688] a helicase activity, i.e., the ability to unwind the helical structure of a double stranded nucleic acid;
[0689] and recognition activity of a nucleic acid molecule, e.g., a target nucleic acid or a gRNA.

[0690] Activity of the Cas9 molecules described herein can be assessed using the activity assays described herein or in the art.

### Identifying Regions Suitable for Deletion

[0691] Suitable regions of Cas9 molecules for deletion can be identified by a variety of methods.

[0692] Naturally-occurring orthologous Cas9 molecules from various bacterial species, e.g., any one of those listed in Table 1, can be modeled onto the crystal structure of S. pyogenes Cas9 (Nishimasu 2014) to examine the level of conservation across the selected Cas9 orthologs with respect to the three-dimensional conformation of the protein. Less conserved or unconserved regions that are spatially located distant from regions involved in Cas9 activity, e.g., interface with the target nucleic acid molecule and/or gRNA, represent regions or domains are candidates for deletion without substantially affecting or decreasing Cas9 activity.

### Nucleic Acids Encoding Cas9 Molecules

[0693] Nucleic acids encoding the Cas9 molecules or Cas9 polypeptides, e.g., an eaCas9 molecule or eaCas9 polypeptides are provided herein. Exemplary nucleic acids encoding Cas9 molecules or Cas9 polypeptides have been described previously (see, e.g., Cong 2013; Wang 2013; Mali 2013; Jinek 2012).

[0694] In an embodiment, a nucleic acid encoding a Cas9 molecule or Cas9 polypeptide can be a synthetic nucleic acid sequence. For example, the synthetic nucleic acid molecule can be chemically modified, e.g., as described herein. In an embodiment, the Cas9 mRNA has one or more (e.g., all of the following properties: it is capped, polyadenylated, substituted with 5-methylcytidine and/or pseudouridine.

[0695] In addition, or alternatively, the synthetic nucleic acid sequence can be codon optimized, e.g., at least one non-common codon or less-common codon has been replaced by a common codon. For example, the synthetic nucleic acid can direct the synthesis of an optimized messenger mRNA, e.g., optimized for expression in a mammalian expression system, e.g., described herein.

[0696] In addition, or alternatively, a nucleic acid encoding a Cas9 molecule or Cas9 polypeptide may comprise a nuclear localization sequence (NLS). Nuclear localization sequences are known in the art.

[0697] An exemplary codon optimized nucleic acid sequence encoding a Cas9 molecule of S. pyogenes is set forth in SEQ ID NO:3. The corresponding amino acid sequence of an S. pyogenes Cas9 molecule is set forth in SEQ ID NO:2.

[0698] An exemplary codon optimized nucleic acid sequence encoding a Cas9 molecule of S. aureus is set forth in SEQ ID NO:7. An amino acid sequence of an S. aureus Cas9 molecule is set forth in SEQ ID NO:6.

[0699] Provided below is an exemplary codon optimized nucleic acid sequence encoding a Cas9 molecule of S. aureus Cas9.

[0700] If any of the above Cas9 sequences are fused with a peptide or polypeptide at the C-terminus, it is understood that the stop codon will be removed.

### Other Cas Molecules and Cas Polypeptides

[0701] Various types of Cas molecules or Cas polypeptides can be used to practice the inventions disclosed herein. In some embodiments, Cas molecules of Type II Cas systems are used. In other embodiments, Cas molecules of other Cas systems are used. For example, Type I or Type III Cas molecules may be used. Exemplary Cas molecules (and Cas systems) have been described previously (see, e.g., Haft 2005 and Makarova 2011). Exemplary Cas molecules (and Cas systems) are also shown in Table 2.

### Cpf1 Molecules

[0702] The crystal structure of Acidaminococcus sp. Cpf1 in complex with crRNA and a double-stranded (ds) DNA target including a TTTN PAM sequence has been solved by Yamano 2016, incorporated by reference herein. Cpf1, like Cas9, has two lobes: a REC (recognition) lobe, and a NUC (nuclease) lobe. The REC lobe includes REC1 and REC2 domains, which lack similarity to any known protein structures. The NUC lobe, meanwhile, includes three RuvC domains (RuvC-I, -II and -III) and a BH domain. However, in contrast to Cas9, the Cpf1 REC lobe lacks an HNH domain, and includes other domains that also lack similarity to known protein structures: a structurally unique PI domain, three Wedge (WED) domains (WED-I, -II and -III), and a nuclease (Nuc) domain.

[0703] While Cas9 and Cpf1 share similarities in structure and function, it should be appreciated that certain Cpf1 activities are mediated by structural domains that are not analogous to any Cas9 domains. For instance, cleavage of the complementary strand of the target DNA appears to be mediated by the Nuc domain, which differs sequentially and spatially from the HNH domain of Cas9. Additionally, the non-targeting portion of Cpf1 gRNA (the handle) adopts a pseudoknot structure, rather than a stem loop structure formed by the repeat:antirepeat duplex in Cas9 gRNAs.

### Modifications of RNA-Guided Nucleases

[0704] The RNA-guided nucleases described above have activities and properties that can be useful in a variety of applications, but the skilled artisan will appreciate that RNA-guided nucleases can also be modified in certain instances, to alter cleavage activity, PAM specificity, or other structural or functional features.

[0705] Turning first to modifications that alter cleavage activity, mutations that reduce or eliminate the activity of domains within the NUC lobe have been described above. Exemplary mutations that may be made in the RuvC domains, in the Cas9 HNH domain, or in the Cpf1 Nuc domain are described in Ran 2013 and Yamano 2016, as well as in Cotta-Ramusino 2016. In general, mutations that reduce or eliminate activity in one of the two nuclease domains result in RNA-guided nucleases with nickase activity, but it should be noted that the type of nickase activity varies depending on which domain is inactivated. As one example, inactivation of a RuvC domain of a Cas9 will result in a nickase that cleaves the complementary or top strand as shown below (where C denotes the site of cleavage):
[0706] 5′---------[protospacer]--[C]---------------------3′
[0707] 3′--------------------------------------------------------------5′

[0708] On the other hand, inactivation of a Cas9 HNH domain results in a nickase that cleaves the bottom or non-complementary strand:
[0709] 5′-------------------[protospacer]---------------------------3′
[0710] 3′-------------------------------------[C]---------5′

[0711] Modifications of PAM specificity relative to naturally occurring Cas9 reference molecules has been described by Kleinstiver 2015a for both S. pyogenes and S. aureus (Kleinstiver 2015b). Kleinstiver et al. have also described modifications that improve the targeting fidelity of Cas9 (Kleinstiver 2016). Each of these references is incorporated by reference herein.

[0712] RNA-guided nucleases have been split into two or more parts, as described by Zetsche 2015, incorporated by reference, and by Fine 2015, incorporated by reference.

[0713] RNA-guided nucleases can be, in certain embodiments, size-optimized or truncated, for instance via one or more deletions that reduce the size of the nuclease while still retaining gRNA association, target and PAM recognition, and cleavage activities. In certain embodiments, RNA guided nucleases are bound, covalently or non-covalently, to another polypeptide, nucleotide, or other structure, optionally by means of a linker. Exemplary bound nucleases and linkers are described by Guilinger 2014, which is incorporated by reference for all purposes herein.

[0714] RNA-guided nucleases also optionally include a tag, such as, but not limited to, a nuclear localization signal to facilitate movement of RNA-guided nuclease protein into the nucleus. In certain embodiments, the RNA-guided nuclease can incorporate C- and/or N-terminal nuclear localization signals. Nuclear localization sequences are known in the art and are described in Maeder and elsewhere.

[0715] The foregoing list of modifications is intended to be exemplary in nature, and the skilled artisan will appreciate, in view of the instant disclosure, that other modifications may be possible or desirable in certain applications. For brevity, therefore, exemplary systems, methods and compositions of the present disclosure are presented with reference to particular RNA-guided nucleases, but it should be understood that the RNA-guided nucleases used may be modified in ways that do not alter their operating principles. Such modifications are within the scope of the present disclosure.

### Nucleic Acids Encoding RNA-Guided Nucleases

[0716] Nucleic acids encoding RNA-guided nucleases, e.g., Cas9, Cpf1 or functional fragments thereof, are provided herein. Exemplary nucleic acids encoding RNA-guided nucleases have been described previously (see, e.g., Cong 2013; Wang 2013; Mali 2013; Jinek 2012).

[0717] In some cases, a nucleic acid encoding an RNA-guided nuclease can be a synthetic nucleic acid sequence. For example, the synthetic nucleic acid molecule can be chemically modified. In certain embodiments, an mRNA encoding an RNA-guided nuclease will have one or more (e.g., all) of the following properties: it can be capped; polyadenylated; and substituted with 5-methylcytidine and/or pseudouridine.

[0718] Synthetic nucleic acid sequences can also be codon optimized, e.g., at least one non-common codon or less-common codon has been replaced by a common codon. For example, the synthetic nucleic acid can direct the synthesis of an optimized messenger mRNA, e.g., optimized for expression in a mammalian expression system, e.g., described herein. Examples of codon optimized Cas9 coding sequences are presented in Cotta-Ramusino 2016.

[0719] In addition, or alternatively, a nucleic acid encoding an RNA-guided nuclease may comprise a nuclear localization sequence (NLS). Nuclear localization sequences are known in the art.

### Functional Analysis of Candidate Molecules

[0720] Candidate Cas9 molecules, candidate gRNA molecules, candidate Cas9 molecule/gRNA molecule complexes, can be evaluated by art-known methods or as described herein. For example, exemplary methods for evaluating the endonuclease activity of Cas9 molecule have been described previously (Jinek 2012).

### Binding and Cleavage Assay: Testing the Endonuclease Activity of Cas9 Molecules

[0721] The ability of a Cas9 molecule/gRNA molecule complex to bind to and cleave a target nucleic acid can be evaluated in a plasmid cleavage assay. In this assay, a synthetic or in vitro-transcribed gRNA molecule is pre-annealed prior to the reaction by heating to 95° C. and slowly cooling down to room temperature. Native or restriction digest-linearized plasmid DNA (300 ng (˜8 nM)) is incubated for 60 minutes at 37° C. with purified Cas9 protein molecule (50-500 nM) and gRNA (50-500 nM, 1:1) in a Cas9 plasmid cleavage buffer (20 mM HEPES pH 7.5, 150 mM KCl, 0.5 mM DTT, 0.1 mM EDTA) with or without 10 mM MgCl₂. The reactions are stopped with 5×DNA loading buffer (30% glycerol, 1.2% SDS, 250 mM EDTA), resolved by a 0.8 or 1% agarose gel electrophoresis and visualized by ethidium bromide staining. The resulting cleavage products indicate whether the Cas9 molecule cleaves both DNA strands, or only one of the two strands. For example, linear DNA products indicate the cleavage of both DNA strands, while nicked open circular products indicate that only one of the two strands is cleaved.

[0722] Alternatively, the ability of a Cas9 molecule/gRNA molecule complex to bind to and cleave a target nucleic acid can be evaluated in an oligonucleotide DNA cleavage assay. In this assay, DNA oligonucleotides (10 pmol) are radiolabeled by incubating with 5 units T4 polynucleotide kinase and ˜3-6 pmol (˜20-40 mCi) [γ-³²P]-ATP in 1× T4 polynucleotide kinase reaction buffer at 37° C. for 30 minutes, in a 50 μL reaction. After heat inactivation (65° C. for 20 min), reactions are purified through a column to remove unincorporated label. Duplex substrates (100 nM) are generated by annealing labeled oligonucleotides with equimolar amounts of unlabeled complementary oligonucleotide at 95° C. for 3 minutes, followed by slow cooling to room temperature. For cleavage assays, gRNA molecules are annealed by heating to 95° C. for 30 seconds, followed by slow cooling to room temperature. Cas9 (500 nM final concentration) is pre-incubated with the annealed gRNA molecules (500 nM) in cleavage assay buffer (20 mM HEPES pH 7.5, 100 mM KCl, 5 mM MgCl2, 1 mM DTT, 5% glycerol) in a total volume of 9 μL. Reactions are initiated by the addition of 1 μL target DNA (10 nM) and incubated for 1 hour at 37° C. Reactions are quenched by the addition of 20 μL of loading dye (5 mM EDTA, 0.025% SDS, 5% glycerol in formamide) and heated to 95° C. for 5 minutes. Cleavage products are resolved on 12% denaturing polyacrylamide gels containing 7 M urea and visualized by phosphorimaging. The resulting cleavage products indicate that whether the complementary strand, the non-complementary strand, or both are cleaved.

[0723] One or both of these assays can be used to evaluate the suitability of a candidate gRNA molecule or candidate Cas9 molecule.

### Binding Assay: Testing the Binding of Cas9 Molecules to Target DNA

[0724] Exemplary methods for evaluating the binding of Cas9 molecules to target DNA have been described previously (Jinek 2012).

[0725] For example, in an electrophoretic mobility shift assay, target DNA duplexes are formed by mixing of each strand (10 nmol) in deionized water, heating to 95° C. for 3 minutes, and slow cooling to room temperature. All DNAs are purified on 8% native gels containing 1×TBE. DNA bands are visualized by UV shadowing, excised, and eluted by soaking gel pieces in DEPC-treated H₂O. Eluted DNA is ethanol precipitated and dissolved in DEPC-treated H₂O. DNA samples are 5′ end labeled with [γ-³²P]-ATP using T4 polynucleotide kinase for 30 minutes at 37° C. Polynucleotide kinase is heat denatured at 65° C. for 20 minutes, and unincorporated radiolabel is removed using a column. Binding assays are performed in buffer containing 20 mM HEPES pH 7.5, 100 mM KCl, 5 mM MgCl2, 1 mM DTT, and 10% glycerol in a total volume of 10 μL. Cas9 protein molecules are programmed with equimolar amounts of pre-annealed gRNA molecule and titrated from 100 pM to 1 μM. Radiolabeled DNA is added to a final concentration of 20 pM. Samples are incubated for 1 hour at 37° C. and resolved at 4° C. on an 8% native polyacrylamide gel containing 1×TBE and 5 mM MgCl2. Gels are dried and DNA visualized by phosphorimaging.

### Differential Scanning Flourimetry (DSF)

[0726] The thermostability of Cas9-gRNA ribonucleoprotein (RNP) complexes can be measured via DSF. This technique measures the thermostability of a protein, which can increase under favorable conditions such as the addition of a binding RNA molecule, e.g., a gRNA.

[0727] The assay can be performed using two different protocols, one to test the best stoichiometric ratio of gRNA:Cas9 protein and another to determine the best solution conditions for RNP formation.

[0728] To determine the best solution conditions for forming RNP complexes, a 2 μM solution of Cas9 is made in water with 10× SYPRO Orange® (Life Technologies cat #S-6650) and dispensed into a 384 well plate. An equimolar amount of gRNA diluted in solutions with varied pH and salt is then added. After incubating at room temperature for 10 minutes and brief centrifugation to remove any bubbles, a Bio-Rad CFX384™ Real-Time System C1000 Touch™ Thermal Cycler with the Bio-Rad CFX Manager software is used to run a gradient from 20° C. to 90° C. with a 1° C. increase in temperature every 10 seconds.

[0729] The second assay consists of mixing various concentrations of gRNA with 2 μM Cas9 in optimal buffer from assay 1 above, and incubating at room temperature for 10 minutes in a 384 well plate. An equal volume of optimal buffer and 10× SYPRO Orange® (Life Technologies cat #S-6650) is added and the plate is sealed with Microseal® B adhesive (MSB-1001). Following brief centrifugation to remove any bubbles, a Bio-Rad CFX384™ Real-Time System C1000 Touch™ Thermal Cycler with the Bio-Rad CFX Manager software is used to run a gradient from 20° C. to 90° C. with a 1° C. increase in temperature every 10 seconds.

### HDR Repair, HDR-Mediated Knock-In, and Template Nucleic Acids

[0730] In certain embodiments of the methods provided herein, a mutation in the SERPINA1 gene is corrected by HDR using an exogenously provided template nucleic acid (also referred to herein as a donor construct). While not wishing to be bound by theory, it is believed that alteration of the target sequence occurs by HDR with an exogenously provided donor template or template nucleic acid. For example, the donor construct or template nucleic acid provides for alteration of an A1AT target position, e.g., an A1AT target point position. It is contemplated that a plasmid donor can be used as a template for homologous recombination. It is further contemplated that a single stranded donor template can be used as a template for alteration of a target sequence by alternate methods of HDR (e.g., single strand annealing) between the target sequence and the donor template. Donor template-effected alteration of an A1AT target position depends on cleavage by an RNA-guided nuclease (e.g., a Cas9 molecule). Cleavage by an RNA-guided nuclease (e.g., a Cas9 molecule) can comprise a double-strand break or two single-strand breaks.

[0731] In other embodiments, a mutation in the SERPINA1 gene is corrected by HDR without using an exogenously provided template nucleic acid. While not wishing to be bound by theory, it is believed that alteration of the A1AT target position occurs by HDR with an endogenous genomic donor sequence. For example, the endogenous genomic donor sequence provides for alteration of an A1AT target position, e.g., an A1AT target point position. It is contemplated that in an embodiment the endogenous genomic donor sequence is located on the same chromosome as the target sequence. It is further contemplated that in another embodiment the endogenous genomic donor sequence is located on a different chromosome from the target sequence. Alteration of an A1AT target position by endogenous genomic donor sequence depends on cleavage by an RNA-guided nuclease (e.g., a Cas9 molecule). Cleavage by an RNA-guided nuclease (e.g., a Cas9 molecule) can comprise a double-strand break or two single-strand breaks.

[0732] Mutations that can be corrected by HDR using a template nucleic acid, or using endogenous genomic donor sequence, include point mutations, e.g., a Z mutation or S mutation. In certain embodiments, a point mutation can be corrected using either one double-strand break or two single-strand breaks. In an embodiment, a point mutation can be corrected by (1) one double-strand break, (2) two single-strand breaks, (3) two double-strand breaks with a break occurring on each side of the target position, (4) one double-strand break and two single-strand breaks with the double-strand break and two single-strand breaks occurring on each side of the target position, (5) four single-strand breaks with a pair of single-strand breaks occurring on each side of the target position, or (6) one single-strand break.

[0733] In certain embodiments wherein a single-stranded template nucleic acid is used, the A1AT target position can be altered by alternative HDR.

[0734] Donor template-effected alteration of a target position depends on cleavage by an RNA-guided nuclease (e.g., a Cas9 molecule). Cleavage by an RNA-guided nuclease (e.g., Cas9) can comprise a break (e.g., a nick, a double-strand break, or two single-strand breaks), e.g., one on each strand of the target nucleic acid. After introduction of the breaks on the target nucleic acid, resection occurs at the break ends resulting in single stranded overhanging DNA regions.

[0735] In canonical HDR, a double-stranded donor template is introduced, comprising homologous sequence to the target nucleic acid that will either be directly incorporated into the target nucleic acid or used as a template to correct the sequence of the target nucleic acid. After resection at the break, repair can progress by different pathways, e.g., by the double Holliday junction model (or double strand break repair, DSBR, pathway) or the synthesis-dependent strand annealing (SDSA) pathway. In the double Holliday junction model, strand invasion by the two single stranded overhangs of the target nucleic acid to the homologous sequences in the donor template occurs, resulting in the formation of an intermediate with two Holliday junctions. The junctions migrate as new DNA is synthesized from the ends of the invading strand to fill the gap resulting from the resection. The end of the newly synthesized DNA is ligated to the resected end, and the junctions are resolved, resulting in the correction of the target nucleic acid, e.g., incorporation of the correct sequence of the donor template at the corresponding target position. Crossover with the donor template may occur upon resolution of the junctions. In the SDSA pathway, only one single stranded overhang invades the donor template and new DNA is synthesized from the end of the invading strand to fill the gap resulting from resection. The newly synthesized DNA then anneals to the remaining single stranded overhang, new DNA is synthesized to fill in the gap, and the strands are ligated to produce the corrected DNA duplex.

[0736] In alternative HDR, a single strand donor template, e.g., template nucleic acid, is introduced. A nick, single-strand break, or double-strand break at the target nucleic acid, for altering a desired A1AT target position, is mediated by an RNA-guided nuclease (e.g., a Cas9 molecule), e.g., described herein, and resection at the break occurs to reveal single stranded overhangs. Incorporation of the sequence of the template nucleic acid to correct or alter the target position of the target nucleic acid typically occurs by the SDSA pathway, as described above.

[0737] Additional details on template nucleic acids are provided in Section IV entitled “Template nucleic acids” in International Application PCT/US2014/057905.

[0738] In certain embodiments, double-strand cleavage is effected by an RNA-guided nuclease (e.g., a Cas9 molecule) having cleavage activity associated with an HNH-like domain and cleavage activity associated with a RuvC-like domain, e.g., an N-terminal RuvC-like domain, e.g., a wild-type Cas9. Such embodiments require only a single gRNA.

[0739] In certain embodiments, one single-strand break, or nick, is effected by an RNA-guided nuclease (e.g., a Cas9 molecule) having nickase activity, e.g., a Cas9 nickase as described herein. A nicked target nucleic acid can be a substrate for alt-HDR.

[0740] In other embodiments, two single-strand breaks, or nicks, are effected by an RNA-guided nuclease (e.g., a Cas9 molecule) having nickase activity, e.g., cleavage activity associated with an HNH-like domain or cleavage activity associated with an N-terminal RuvC-like domain. Such embodiments usually require two gRNAs, one for placement of each single strand break. In an embodiment, the Cas9 molecule having nickase activity cleaves the strand to which the gRNA hybridizes, but not the strand that is complementary to the strand to which the gRNA hybridizes. In an embodiment, the Cas9 molecule having nickase activity does not cleave the strand to which the gRNA hybridizes, but rather cleaves the strand that is complementary to the strand to which the gRNA hybridizes.

[0741] In certain embodiments, the nickase has HNH activity, e.g., a Cas9 molecule having the RuvC activity inactivated, e.g., a Cas9 molecule having a mutation at D10, e.g., the D10A mutation. D10A inactivates RuvC; therefore, the Cas9 nickase has (only) HNH activity and will cut on the strand to which the gRNA hybridizes (e.g., the complementary strand, which does not have the NGG PAM on it). In other embodiments, a Cas9 molecule having an H840, e.g., an H840A, mutation can be used as a nickase. H840A inactivates HNH; therefore, the Cas9 nickase has (only) RuvC activity and cuts on the non-complementary strand (e.g., the strand that has the NGG PAM and whose sequence is identical to the gRNA). In other embodiments, a Cas9 molecule having an N863 mutation, e.g., the N863A mutation, mutation can be used as a nickase. N863A inactivates HNH therefore the Cas9 nickase has (only) RuvC activity and cuts on the non-complementary strand (the strand that has the NGG PAM and whose sequence is identical to the gRNA).

[0742] In certain embodiments in which a nickase and two gRNAs are used to position two single strand nicks, one nick is on the + strand and one nick is on the − strand of the target nucleic acid. The PAMs can be outwardly facing. The gRNAs can be selected such that the gRNAs are separated by, from about 0-50, 0-100, or 0-200 nucleotides. In an embodiment, there is no overlap between the target sequences that are complementary to the targeting domains of the two gRNAs. In an embodiment, the gRNAs do not overlap and are separated by as much as 50, 100, or 200 nucleotides. In an embodiment, the use of two gRNAs can increase specificity, e.g., by decreasing off-target binding (Ran 2013).

[0743] In certain embodiments, a single nick can be used to induce HDR, e.g., alt-HDR. It is contemplated herein that a single nick can be used to increase the ratio of HR to NHEJ at a given cleavage site. In an embodiment, a single-strand break is formed in the strand of the target nucleic acid to which the targeting domain of said gRNA is complementary. In other embodiments, a single-strand break is formed in the strand of the target nucleic acid other than the strand to which the targeting domain of said gRNA is complementary.

### Placement of Double-Strand or Single-Strand Breaks Relative to the Target Position

[0744] A double-strand break or single-strand break in one of the strands should be sufficiently close to an A1AT target position that an alteration is produced in the desired region, e.g., correction of a mutation occurs. In certain embodiments, the distance is not more than 50, 100, 200, 300, 350, or 400 nucleotides from the A1AT target position. While not wishing to be bound by theory, in certain embodiments it is believed that the break should be sufficiently close to the A1AT target position that the target position is within the region that is subject to exonuclease-mediated removal during end resection. If the distance between the target position and a break is too great, the mutation or other sequence desired to be altered may not be included in the end resection and, therefore, may not be corrected, as donor sequence, either exogenously provided donor sequence or endogenous genomic donor sequence, in some embodiments is only used to correct sequence within the end resection region.

[0745] In certain embodiments, the gRNA targeting domain is configured such that a cleavage event, e.g., a double strand or single strand break, is positioned within 1, 2, 3, 4, 5, 10, 15, 20, 25, 30, 35, 40, 45, 50, 60, 70, 80, 90, 100, 150, or 200 nucleotides of the region desired to be altered, e.g., a mutation. The break, e.g., a double-strand or single-strand break, can be positioned upstream or downstream of the region desired to be altered, e.g., a mutation. In some embodiments, a break is positioned within the region desired to be altered, e.g., within a region defined by at least two mutant nucleotides. In some embodiments, a break is positioned immediately adjacent to the region desired to be altered, e.g., immediately upstream or downstream of a mutation.

[0746] In certain embodiments, a single-strand break is accompanied by an additional single-strand break, positioned by a second gRNA molecule, as discussed below. For example, the targeting domains bind configured such that a cleavage event, e.g., the two single-strand breaks, are positioned within 1, 2, 3, 4, 5, 10, 15, 20, 25, 30, 35, 40, 45, 50, 60, 70, 80, 90, 100, 150, or 200 nucleotides of an A1AT target position. In an embodiment, the first and second gRNA molecules are configured such that, when guiding a Cas9 nickase, a single-strand break will be accompanied by an additional single strand break, positioned by a second gRNA, sufficiently close to one another to result in alteration of the desired region. In an embodiment, the first and second gRNA molecules are configured such that a single-strand break positioned by said second gRNA is within 10, 20, 30, 40, or 50 nucleotides of the break positioned by said first gRNA molecule, e.g., when the Cas9 is a nickase. In an embodiment, the two gRNA molecules are configured to position cuts at the same position, or within a few nucleotides of one another, on different strands, e.g., essentially mimicking a double-strand break.

[0747] In certain embodiments in which a gRNA (unimolecular (or chimeric) or modular gRNA) and Cas9 nuclease induce a double-strand break for the purpose of inducing HDR-mediated correction, the cleavage site is 0-200 bp (e.g., 0 to 175, 0 to 150, 0 to 125, 0 to 100, 0 to 75, 0 to 50, 0 to 25, 25 to 200, 25 to 175, 25 to 150, 25 to 125, 25 to 100, 25 to 75, 25 to 50, 50 to 200, 50 to 175, 50 to 150, 50 to 125, 50 to 100, 50 to 75, 75 to 200, 75 to 175, 75 to 150, 75 to 125, 75 to 100 bp) away from the A1AT target position. In certain embodiments, the cleavage site is 0-100 bp (e.g., 0 to 75, 0 to 50, 0 to 25, 25 to 100, 25 to 75, 25 to 50, 50 to 100, 50 to 75 or 75 to 100 bp) away from the A1AT target position.

[0748] In certain embodiments, one can promote HDR by using nickases to generate a break with overhangs. While not wishing to be bound by theory, the single stranded nature of the overhangs can enhance the likelihood of a cell repairing the break by HDR as opposed to, e.g., NHEJ. Specifically, in some embodiments, HDR is promoted by selecting a first gRNA that targets a first nickase to a first target sequence, and a second gRNA that targets a second nickase to a second target sequence which is on the opposite DNA strand from the first target sequence and offset from the first nick.

[0749] In certain embodiments, the targeting domain of a gRNA molecule is configured to position a cleavage event sufficiently far from a preselected nucleotide, e.g., the nucleotide of a coding region, that the nucleotide is not altered. In certain embodiments, the targeting domain of a gRNA molecule is configured to position an intronic cleavage event sufficiently far from an intron/exon border, or naturally occurring splice signal, to avoid alteration of the exonic sequence or unwanted splicing events. The gRNA molecule may be a first, second, third and/or fourth gRNA molecule, as described herein.

### Placement of a First Break and a Second Break Relative to Each Other

[0750] In certain embodiments, a double-strand break can be accompanied by an additional double-strand break, positioned by a second gRNA molecule, as is discussed below.

[0751] In certain embodiments, a double-strand break can be accompanied by two additional single-strand breaks, positioned by a second gRNA molecule and a third gRNA molecule.

[0752] In certain embodiments, first and second single-strand breaks can be accompanied by two additional single-strand breaks positioned by a third gRNA molecule and a fourth gRNA molecule.

[0753] When two or more gRNAs are used to position two or more cleavage events, e.g., double-strand or single-strand breaks, in a target nucleic acid, it is contemplated that the two or more cleavage events may be made by the same or different RNA-guided nucleases (e.g., Cas9 proteins). For example, when two gRNAs are used to position two double-strand breaks, a single Cas9 nuclease may be used to create both double-strand breaks. When two or more gRNAs are used to position two or more single-strand breaks (nicks), a single Cas9 nickase may be used to create the two or more nicks. When two or more gRNAs are used to position at least one double-strand break and at least one single-strand break, two Cas9 proteins may be used, e.g., one Cas9 nuclease and one Cas9 nickase. It is contemplated that when two or more Cas9 proteins are used that the two or more Cas9 proteins may be delivered sequentially to control specificity of a double-strand versus a single-strand break at the desired position in the target nucleic acid.

[0754] In some embodiments, the targeting domain of the first gRNA molecule and the targeting domain of the second gRNA molecules are complementary to opposite strands of the target nucleic acid molecule. In some embodiments, the gRNA molecule and the second gRNA molecule are configured such that the PAMs are oriented outward.

[0755] In certain embodiments, two gRNA are selected to direct Cas9-mediated cleavage at two positions that are a preselected distance from each other. In certain embodiments, the two points of cleavage are on opposite strands of the target nucleic acid. In some embodiments, the two cleavage points form a blunt ended break, and in other embodiments, they are offset so that the DNA ends comprise one or two overhangs (e.g., one or more 5′ overhangs and/or one or more 3′ overhangs). In some embodiments, each cleavage event is a nick. In certain embodiments, the nicks are close enough together that they form a break that is recognized by the double stranded break machinery (as opposed to being recognized by, e.g., the SSBr machinery). In certain embodiments, the nicks are far enough apart that they create an overhang that is a substrate for HDR, i.e., the placement of the breaks mimics a DNA substrate that has experienced some resection. For instance, in some embodiments the nicks are spaced to create an overhang that is a substrate for processive resection. In some embodiments, the two breaks are spaced within 25-65 nucleotides of each other. The two breaks may be, e.g., about 25, 30, 35, 40, 45, 50, 55, 60, or 65 nucleotides of each other. The two breaks may be, e.g., at least about 25, 30, 35, 40, 45, 50, 55, 60 or 65 nucleotides of each other. The two breaks may be, e.g., at most about 30, 35, 40, 45, 50, 55, 60, or 65 nucleotides of each other. In certain embodiments, the two breaks are about 25-30, 30-35, 35-40, 40-45, 45-50, 50-55, 55-60, or 60-65 nucleotides of each other.

[0756] In some embodiments, the break that mimics a resected break comprises a 3′ overhang (e.g., generated by a DSB and a nick, where the nick leaves a 3′ overhang), a 5′ overhang (e.g., generated by a DSB and a nick, where the nick leaves a 5′ overhang), a 3′ and a 5′ overhang (e.g., generated by three cuts), two 3′ overhangs (e.g., generated by two nicks that are offset from each other), or two 5′ overhangs (e.g., generated by two nicks that are offset from each other).

[0757] In certain embodiments in which two gRNAs (independently, unimolecular (or chimeric) or modular gRNA) complexing with Cas9 nickases induce two single-strand breaks for the purpose of inducing HDR-mediated correction, the closer nick is between 0-200 bp (e.g., 0 to 175, 0 to 150, 0 to 125, 0 to 100, 0 to 75, 0 to 50, 0 to 25, 25 to 200, 25 to 175, 25 to 150, 25 to 125, 25 to 100, 25 to 75, 25 to 50, 50 to 200, 50 to 175, 50 to 150, 50 to 125, 50 to 100, 50 to 75, 75 to 200, 75 to 175, 75 to 150, 75 to 125, or 75 to 100 bp) away from the A1AT target position and the two nicks will ideally be within 25-65 bp of each other (e.g., 25 to 50, 25 to 45, 25 to 40, 25 to 35, 25 to 30, 30 to 55, 30 to 50, 30 to 45, 30 to 40, 30 to 35, 35 to 55, 35 to 50, 35 to 45, 35 to 40, 40 to 55, 40 to 50, 40 to 45 bp, 45 to 50 bp, 50 to 55 bp, 55 to 60 bp, or 60 to 65 bp) and no more than 100 bp away from each other (e.g., no more than 90, 80, 70, 60, 50, 40, 30, 20, 10, or 5 bp away from each other). In certain embodiments, the cleavage site is between 0-100 bp (e.g., 0 to 75, 0 to 50, 0 to 25, 25 to 100, 25 to 75, 25 to 50, 50 to 100, 50 to 75, or 75 to 100 bp) away from the A1AT target position.

[0758] In some embodiments, two gRNAs, e.g., independently, unimolecular (or chimeric) or modular gRNA, are configured to position a double-strand break on both sides of a target position. In other embodiments, three gRNAs, e.g., independently, unimolecular (or chimeric) or modular gRNA, are configured to position a double-strand break (i.e., one gRNA complexes with a cas9 nuclease) and two single-strand breaks or paired single-strand breaks (i.e., two gRNAs complex with Cas9 nickases) on either side of the target position. In other embodiments, four gRNAs, e.g., independently, unimolecular (or chimeric) or modular gRNA, are configured to generate two pairs of single-strand breaks (i.e., two pairs of two gRNAs complex with Cas9 nickases) on either side of the target position. The double-strand break(s) or the closer of the two single-strand nicks in a pair will ideally be within 0-500 bp of the A1AT target position (e.g., no more than 450, 400, 350, 300, 250, 200, 150, 100, 50 or 25 bp from the target position). When nickases are used, the two nicks in a pair are, in certain embodiments, within 25-65 bp of each other (e.g., between 25 to 55, 25 to 50, 25 to 45, 25 to 40, 25 to 35, 25 to 30, 50 to 55, 45 to 55, 40 to 55, 35 to 55, 30 to 55, 30 to 50, 35 to 50, 40 to 50, 45 to 50, 35 to 45, 40 to 45 bp, 45 to 50 bp, 50 to 55 bp, 55 to 60 bp, or 60 to 65 bp) and no more than 100 bp away from each other (e.g., no more than 90, 80, 70, 60, 50, 40, 30, or 20 or 10 bp).

[0759] When two gRNAs are used to target RNA-guided nucleases (e.g., Cas9 molecules) to breaks, different combinations of RNA-guided nucleases (e.g., Cas9 molecules) are envisioned. In some embodiments, a first gRNA is used to target a first RNA-guided nuclease (e.g., Cas9 molecule) to a first target position, and a second gRNA is used to target a second RNA-guided nuclease (e.g., Cas9 molecule) to a second target position. In some embodiments, the first RNA-guided nuclease (e.g., Cas9 molecule) creates a nick on the first strand of the target nucleic acid, and the second RNA-guided nuclease (e.g., Cas9 molecule) creates a nick on the opposite strand, resulting in a double-strand break (e.g., a blunt ended cut or a cut with overhangs).

[0760] Different combinations of nickases can be chosen to target one single-strand break to one strand and a second single-strand break to the opposite strand. When choosing a combination, one can take into account that there are nickases having one active RuvC-like domain, and nickases having one active HNH domain. In certain embodiments, a RuvC-like domain cleaves the non-complementary strand of the target nucleic acid molecule. In certain embodiments, an HNH-like domain cleaves a single stranded complementary domain, e.g., a complementary strand of a double stranded nucleic acid molecule. Generally, if both Cas9 molecules have the same active domain (e.g., both have an active RuvC domain or both have an active HNH domain), one will choose two gRNAs that bind to opposite strands of the target. In more detail, in some embodiments a first gRNA is complementary with a first strand of the target nucleic acid and binds a nickase having an active RuvC-like domain and causes that nickase to cleave the strand that is non-complementary to that first gRNA, i.e., a second strand of the target nucleic acid; and a second gRNA is complementary with a second strand of the target nucleic acid and binds a nickase having an active RuvC-like domain and causes that nickase to cleave the strand that is non-complementary to that second gRNA, i.e., the first strand of the target nucleic acid. Conversely, in some embodiments, a first gRNA is complementary with a first strand of the target nucleic acid and binds a nickase having an active HNH domain and causes that nickase to cleave the strand that is complementary to that first gRNA, i.e., a first strand of the target nucleic acid; and a second gRNA is complementary with a second strand of the target nucleic acid and binds a nickase having an active HNH domain and causes that nickase to cleave the strand that is complementary to that second gRNA, i.e., the second strand of the target nucleic acid. In another arrangement, if one Cas9 molecule has an active RuvC-like domain and the other Cas9 molecule has an active HNH domain, the gRNAs for both Cas9 molecules can be complementary to the same strand of the target nucleic acid, so that the Cas9 molecule with the active RuvC-like domain will cleave the non-complementary strand and the Cas9 molecule with the HNH domain will cleave the complementary strand, resulting in a double stranded break.

### Homology Arms of the Donor Template

[0761] A homology arm should extend at least as far as the region in which end resection may occur, e.g., in order to allow the resected single stranded overhang to find a complementary region within the donor template. The overall length could be limited by parameters such as plasmid size or viral packaging limits. In an embodiment, a homology arm does not extend into repeated elements, e.g., Alu repeats or LINE repeats.

[0762] Exemplary homology arm lengths include at least 50, 100, 250, 500, 750, 1000, 2000, 3000, 4000, or 5000 nucleotides. In some embodiments, the homology arm length is 50-100, 100-250, 250-500, 500-750, 750-1000, 1000-2000, 2000-3000, 3000-4000, or 4000-5000 nucleotides.

[0763] A template nucleic acid, as that term is used herein, refers to a nucleic acid sequence which can be used in conjunction with an RNA-guided nuclease (e.g., a Cas9 molecule) and a gRNA molecule to alter the structure of an A1AT target position. In certain embodiments, the A1AT target position can be a site between two nucleotides, e.g., adjacent nucleotides, on the target nucleic acid into which one or more nucleotides is added. Alternatively, the A1AT target position may comprise one or more nucleotides that are altered, e.g., corrected, by a template nucleic acid.

[0764] In certain embodiments, the target nucleic acid is modified to have some or all of the sequence of the template nucleic acid, typically at or near cleavage site(s). In certain embodiments, the template nucleic acid is single stranded. In other embodiments, the template nucleic acid is double stranded. In certain embodiments, the template nucleic acid is DNA, e.g., double stranded DNA. In other embodiments, the template nucleic acid is single stranded DNA. In an embodiment, the template nucleic acid is encoded on the same vector backbone, e.g., AAV genome, plasmid DNA, as the RNA-guided nuclease (e.g., Cas9 molecule) and gRNA. In certain embodiments, the template nucleic acid is excised from a vector backbone in vivo, e.g., it is flanked by gRNA recognition sequences. In certain embodiments, the template nucleic acid comprises endogenous genomic sequence.

[0765] In certain embodiments, the template nucleic acid alters the structure of the target position by participating in an HDR event. In certain embodiments, the template nucleic acid alters the sequence of the target position. In certain embodiments, the template nucleic acid results in the incorporation of a modified, or non-naturally occurring base into the target nucleic acid.

[0766] Typically, the template sequence undergoes a breakage mediated or catalyzed recombination with the target sequence. In an embodiment, the template nucleic acid includes sequence that corresponds to a site on the target sequence that is cleaved by an eaCas9 mediated cleavage event. In an embodiment, the template nucleic acid includes sequence that corresponds to both a first site on the target sequence that is cleaved in a first Cas9 mediated event, and a second site on the target sequence that is cleaved in a second Cas9 mediated event.

[0767] In certain embodiments, the template nucleic acid can include sequence which results in an alteration in the coding sequence of a translated sequence, e.g., one which results in the substitution of one amino acid for another in a protein product, e.g., transforming a mutant allele into a wild-type allele, transforming a wild-type allele into a mutant allele, and/or introducing a stop codon, insertion of an amino acid residue, deletion of an amino acid residue, or a nonsense mutation.

[0768] In other embodiments, the template nucleic acid can include sequence which results in an alteration in a non-coding sequence, e.g., an alteration in an exon or in a 5′ or 3′ non-translated or non-transcribed region. Such alterations include an alteration in a control element, e.g., a promoter, enhancer, and an alteration in a cis-acting or trans-acting control element.

[0769] A template nucleic acid having homology with a target position in the SERPINA1 gene can be used to alter the structure of a target sequence. The template sequence can be used to alter an unwanted structure, e.g., an unwanted or mutant nucleotide.

[0770] A template nucleic acid typically comprises the following components:
[0771] [5′ homology arm]-[replacement sequence]-[3′ homology arm].

[0772] The homology arms provide for recombination into the chromosome, thus replacing the undesired element, e.g., a mutation or signature, with the replacement sequence. In certain embodiments, the homology arms flank the most distal cleavage sites.

[0773] In certain embodiments, the 3′ end of the 5′ homology arm is the position next to the 5′ end of the replacement sequence. In certain embodiments, the 5′ homology arm can extend at least 10, 20, 30, 40, 50, 100, 200, 300, 400, 500, 600, 700, 800, 900, 1000, 1500, 2000, 3000, 4000, or 5000 nucleotides 5′ from the 5′ end of the replacement sequence.

[0774] In certain embodiments, the 5′ end of the 3′ homology arm is the position next to the 3′ end of the replacement sequence. In certain embodiments, the 3′ homology arm can extend at least 10, 20, 30, 40, 50, 100, 200, 300, 400, 500, 600, 700, 800, 900, 1000, 1500, 2000, 3000, 4000, or 5000 nucleotides 3′ from the 3′ end of the replacement sequence.

[0775] In certain embodiments, to correct a mutation, the homology arms, e.g., the 5′ and 3′ homology arms, may each comprise about 1000 bp of sequence flanking the most distal gRNAs (e.g., 1000 bp of sequence on either side of the mutation).

[0776] It is contemplated herein that one or both homology arms may be shortened to avoid including certain sequence repeat elements, e.g., Alu repeats or LINE elements. For example, a 5′ homology arm may be shortened to avoid a sequence repeat element. In other embodiments, a 3′ homology arm may be shortened to avoid a sequence repeat element. In some embodiments, both the 5′ and the 3′ homology arms may be shortened to avoid including certain sequence repeat elements.

[0777] It is contemplated herein that template nucleic acids for correcting a mutation may be designed for use as a single-stranded oligonucleotide, e.g., a single-stranded oligodeoxynucleotide (ssODN). When using a ssODN, 5′ and 3′ homology arms may range up to about 200 nucleotides in length, e.g., at least 25, 50, 75, 100, 125, 150, 175, or 200 nucleotides in length. Longer homology arms that may be 200 to 2000 nucleotides in length are also contemplated for ssODNs as improvements in oligonucleotide synthesis continue to be made. In some embodiments, a longer homology arm is made by a method other than chemical synthesis, e.g., by denaturing a long double stranded nucleic acid and purifying one of the strands, e.g., by affinity for a strand-specific sequence anchored to a solid substrate.

[0778] While not wishing to be bound by theory, in certain embodiments alt-HDR proceeds more efficiently when the template nucleic acid has extended homology 5′ to the break (e.g., nick) (i.e., in the 5′ direction of the nicked strand). Accordingly, in some embodiments, the template nucleic acid has a longer homology arm and a shorter homology arm, wherein the longer homology arm can anneal 5′ of the break (e.g., nick). In some embodiments, the arm that can anneal 5′ to the break (e.g., nick) is at least 25, 50, 75, 100, 125, 150, 175, or 200, 300, 400, 500, 600, 700, 800, 900, 1000, 1500, 2000, 3000, 4000, or 5000 nucleotides from the break (e.g., nick) or the 5′ or 3′ end of the replacement sequence. In some embodiments, the arm that can anneal 5′ to the break (e.g., nick) is at least 10%, 20%, 30%, 40%, or 50% longer than the arm that can anneal 3′ to the break (e.g., nick). In some embodiments, the arm that can anneal 5′ to the break (e.g., nick) is at least 2×, 3×, 4×, or 5× longer than the arm that can anneal 3′ to the break (e.g., nick). Depending on whether a ssDNA template can anneal to the intact strand or the nicked strand, the homology arm that anneals 5′ to the break (e.g., nick) may be at the 5′ end of the ssDNA template or the 3′ end of the ssDNA template, respectively.

[0779] Similarly, in some embodiments, the template nucleic acid has a 5′ homology arm, a replacement sequence, and a 3′ homology arm, such that the template nucleic acid has extended homology to the 5′ of the break (e.g., nick). For example, the 5′ homology arm and 3′ homology arm may be substantially the same length, but the replacement sequence may extend farther 5′ of the break (e.g., nick) than 3′ of the break (e.g., nick). In some embodiments, the replacement sequence extends at least 10%, 20%, 30%, 40%, 50%, 2x, 3x, 4x, or 5x further to the 5′ end of the break (e.g., nick) than the 3′ end of the break (e.g., nick).

[0780] While not wishing to be bound by theory, in some embodiments alt-HDR proceeds more efficiently when the template nucleic acid is centered on the break (e.g., nick). Accordingly, in some embodiments, the template nucleic acid has two homology arms that are essentially the same size. For instance, the first homology arm of a template nucleic acid may have a length that is within 10%, 9%, 8%, 7%, 6%, 5%, 4%, 3%, 2%, or 1% of the second homology arm of the template nucleic acid.

[0781] Similarly, in some embodiments, the template nucleic acid has a 5′ homology arm, a replacement sequence, and a 3′ homology arm, such that the template nucleic acid extends substantially the same distance on either side of the break (e.g., nick or double-strand break). For example, the homology arms may have different lengths, but the replacement sequence may be selected to compensate for this. For example, the replacement sequence may extend further 5′ from the break (e.g., nick or double-strand break) than it does 3′ of the break (e.g., nick or double-strand break), but the homology arm 5′ of the break (e.g., nick or double-strand break) is shorter than the homology arm 3′ of the break (e.g., nick or double-strand break), to compensate. The converse is also possible, e.g., that the replacement sequence may extend further 3′ from the break (e.g., nick or double-strand break) than it does 5′ of the break (e.g., nick or double-strand break), but the homology arm 3′ of the break (e.g., nick or double-strand break) is shorter than the homology arm 5′ of the break (e.g., nick or double-strand break), to compensate.

### Exemplary Template Nucleic Acids

[0782] In certain embodiments, the template nucleic acid is double stranded. In other embodiments, the template nucleic acid is single stranded. In certain embodiments, the template nucleic acid comprises a single stranded portion and a double stranded portion. In certain embodiments, the template nucleic acid comprises about 50 to 100 bp, e.g., 55 to 95, 60 to 90, 65 to 85, or 70 to 80 bp, homology on either side of the break (e.g., nick or double-strand break) and/or replacement sequence. In certain embodiments, the template nucleic acid comprises about 50, 55, 60, 65, 70, 75, 80, 85, 90, 95, or 100 bp homology 5′ of the break (e.g., nick or double-strand break) or replacement sequence, 3′ of the break (e.g., nick or double-strand break) or replacement sequence, or both 5′ and 3′ of the break (e.g., nick or double-strand break) or replacement sequences.

[0783] In certain embodiments, the template nucleic acid comprises about 150 to 200 bp, e.g., 155 to 195, 160 to 190, 165 to 185, or 170 to 180 bp, homology 3′ of the break (e.g., nick or double-strand break) and/or replacement sequence. In certain embodiments, the template nucleic acid comprises about 150, 155, 160, 165, 170, 175, 180, 185, 190, 195, or 200 bp homology 3′ of the break (e.g., nick or double-strand break) or replacement sequence. In certain embodiments, the template nucleic acid comprises less than about 100, 90, 80, 70, 60, 50, 40, 30, 20, 15, or 10 bp homology 5′ of the break (e.g., nick or double-strand break) or replacement sequence.

[0784] In certain embodiments, the template nucleic acid comprises about 150 to 200 bp, e.g., 155 to 195, 160 to 190, 165 to 185, or 170 to 180 bp, homology 5′ of the break (e.g., nick or double-strand break) and/or replacement sequence. In certain embodiments, the template nucleic acid comprises about 150, 155, 160, 165, 170, 175, 180, 185, 190, 195, or 200 bp homology 5′ of the break (e.g., nick or double-strand break) or replacement sequence. In certain embodiments, the template nucleic acid comprises less than about 100, 90, 80, 70, 60, 50, 40, 30, 20, 15, or 10 bp homology 3′ of the break (e.g., nick or double-strand break) or replacement sequence.

[0785] In certain embodiments, the template nucleic acid comprises a nucleotide sequence, e.g., of one or more nucleotides, that will be added to or will template a change in the target nucleic acid. In other embodiments, the template nucleic acid comprises a nucleotide sequence that may be used to modify the target position. In other embodiments, the template nucleic acid comprises a nucleotide sequence, e.g., of one or more nucleotides, that corresponds to wild-type sequence of the target nucleic acid, e.g., of the target position.

[0786] The template nucleic acid may comprise a replacement sequence. In some embodiments, the template nucleic acid comprises a 5′ homology arm. In other embodiments, the template nucleic acid comprises a 3′ homology arm.

[0787] In certain embodiments, the template nucleic acid is linear double stranded DNA. The length may be, e.g., about 150-200 bp, e.g., about 150, 160, 170, 180, 190, or 200 bp. The length may be, e.g., at least 150, 160, 170, 180, 190, or 200 bp. In some embodiments, the length is no greater than 150, 160, 170, 180, 190, or 200 bp. In some embodiments, a double stranded template nucleic acid has a length of about 160 bp, e.g., about 155-165, 150-170, 140-180, 130-190, 120-200, 110-210, 100-220, 90-230, or 80-240 bp.

[0788] The template nucleic acid can be linear single stranded DNA. In certain embodiments, the template nucleic acid is (i) linear single stranded DNA that can anneal to the nicked strand of the target nucleic acid, (ii) linear single stranded DNA that can anneal to the intact strand of the target nucleic acid, (iii) linear single stranded DNA that can anneal to the transcribed strand of the target nucleic acid, (iv) linear single stranded DNA that can anneal to the non-transcribed strand of the target nucleic acid, or more than one of the preceding. The length may be, e.g., about 150-200 nucleotides, e.g., about 150, 160, 170, 180, 190, or 200 nucleotides. The length may be, e.g., at least 150, 160, 170, 180, 190, or 200 nucleotides. In some embodiments, the length is no greater than 150, 160, 170, 180, 190, or 200 nucleotides. In some embodiments, a single stranded template nucleic acid has a length of about 160 nucleotides, e.g., about 155-165, 150-170, 140-180, 130-190, 120-200, 110-210, 100-220, 90-230, or 80-240 nucleotides. In certain embodiments, a single stranded template nucleic acid has a length of about 50-2000 nucleotides, e.g., about 50, 100, 200, 300, 400, 500, 600, 700, 800, 900, 1000, 1100, 1200, 1300, 1400, 1500, 1600, 1700, 1800, 1900, or 2000 nucleotides.

[0789] In some embodiments, the template nucleic acid is circular double stranded DNA, e.g., a plasmid. In some embodiments, the template nucleic acid comprises about 500 to 1000 bp of homology on either side of the replacement sequence and/or the break (e.g., nick or double-strand break). In some embodiments, the template nucleic acid comprises about 300, 400, 500, 600, 700, 800, 900, 1000, 1500, or 2000 bp of homology 5′ of the break (e.g., nick or double-strand break) or replacement sequence, 3′ of the break (e.g., nick or double-strand break) or replacement sequence, or both 5′ and 3′ of the break (e.g., nick or double-strand break) or replacement sequence. In some embodiments, the template nucleic acid comprises at least 300, 400, 500, 600, 700, 800, 900, 1000, 1500, or 2000 bp of homology 5′ of the break (e.g., nick or double-strand break) or replacement sequence, 3′ of the break (e.g., nick or double-strand break) or replacement sequence, or both 5′ and 3′ of the break (e.g., nick or double-strand break) or replacement sequence. In some embodiments, the template nucleic acid comprises no more than 300, 400, 500, 600, 700, 800, 900, 1000, 1500, or 2000 bp of homology 5′ of the break (e.g., nick or double-strand break) or replacement sequence, 3′ of the break (e.g., nick or double-strand break) or replacement sequence, or both 5′ and 3′ of the break (e.g., nick or double-strand break) or replacement sequence.

[0790] In certain embodiments, one or both homology arms may be shortened to avoid including certain sequence repeat elements, e.g., Alu repeats, LINE elements. For example, a 5′ homology arm may be shortened to avoid a sequence repeat element, while a 3′ homology arm may be shortened to avoid a sequence repeat element. In some embodiments, both the 5′ and the 3′ homology arms may be shortened to avoid including certain sequence repeat elements.

[0791] In some embodiments, the template nucleic acid is an adenovirus vector, e.g., an AAV vector, e.g., a ssDNA molecule of a length and sequence that allows it to be packaged in an AAV capsid. The vector may be, e.g., less than 5 kb and may contain an ITR sequence that promotes packaging into the capsid. The vector may be integration-deficient. In some embodiments, the template nucleic acid comprises about 150 to 1000 nucleotides of homology on either side of the replacement sequence and/or the break (e.g., nick or double-strand break). In some embodiments, the template nucleic acid comprises about 100, 150, 200, 300, 400, 500, 600, 700, 800, 900, 1000, 1500, or 2000 nucleotides 5′ of the break (e.g., nick or double-strand break) or replacement sequence, 3′ of the break (e.g., nick or double-strand break) or replacement sequence, or both 5′ and 3′ of the break (e.g., nick or double-strand break) or replacement sequence. In some embodiments, the template nucleic acid comprises at least 100, 150, 200, 300, 400, 500, 600, 700, 800, 900, 1000, 1500, or 2000 nucleotides 5′ of the break (e.g., nick or double-strand break) or replacement sequence, 3′ of the break (e.g., nick or double-strand break) or replacement sequence, or both 5′ and 3′ of the break (e.g., nick or double-strand break) or replacement sequence. In some embodiments, the template nucleic acid comprises at most 100, 150, 200, 300, 400, 500, 600, 700, 800, 900, 1000, 1500, or 2000 nucleotides 5′ of the break (e.g., nick or double-strand break) or replacement sequence, 3′ of the break (e.g., nick or double-strand break) or replacement sequence, or both 5′ and 3′ of the break (e.g., nick or double-strand break) or replacement sequence.

[0792] In some embodiments, the template nucleic acid is a lentiviral vector, e.g., an IDLV (integration deficiency lentivirus). In some embodiments, the template nucleic acid comprises about 500 to 1000 bp of homology on either side of the replacement sequence and/or the break (e.g., nick or double-strand break). In some embodiments, the template nucleic acid comprises about 300, 400, 500, 600, 700, 800, 900, 1000, 1500, or 2000 bp of homology 5′ of the break (e.g., nick or double-strand break) or replacement sequence, 3′ of the break (e.g., nick or double-strand break) or replacement sequence, or both 5′ and 3′ of the break (e.g., nick or double-strand break) or replacement sequence. In some embodiments, the template nucleic acid comprises at least 300, 400, 500, 600, 700, 800, 900, 1000, 1500, or 2000 bp of homology 5′ of the break (e.g., nick or double-strand break) or replacement sequence, 3′ of the break (e.g., nick or double-strand break) or replacement sequence, or both 5′ and 3′ of the break (e.g., nick or double-strand break) or replacement sequence. In some embodiments, the template nucleic acid comprises no more than 300, 400, 500, 600, 700, 800, 900, 1000, 1500, or 2000 bp of homology 5′ of the break (e.g., nick or double-strand break) or replacement sequence, 3′ of the break (e.g., nick or double-strand break) or replacement sequence, or both 5′ and 3′ of the break (e.g., nick or double-strand break) or replacement sequence.

[0793] In certain embodiments, the template nucleic acid comprises one or more mutations, e.g., silent mutations, that prevent Cas9 from recognizing and cleaving the template nucleic acid. The template nucleic acid may comprise, e.g., at least 1, 2, 3, 4, 5, 10, 20, or 30 silent mutations relative to the corresponding sequence in the genome of the cell to be altered. In certain embodiments, the template nucleic acid comprises at most 2, 3, 4, 5, 10, 20, 30, or 50 silent mutations relative to the corresponding sequence in the genome of the cell to be altered. In an embodiment, the cDNA comprises one or more mutations, e.g., silent mutations that prevent Cas9 from recognizing and cleaving the template nucleic acid. The template nucleic acid may comprise, e.g., at least 1, 2, 3, 4, 5, 10, 20, or 30 silent mutations relative to the corresponding sequence in the genome of the cell to be altered. In certain embodiments, the template nucleic acid comprises at most 2, 3, 4, 5, 10, 20, 30, or 50 silent mutations relative to the corresponding sequence in the genome of the cell to be altered.

[0794] In certain embodiments, a template nucleic acid for correcting a c.1024G>A mutation in in the human SERPINA1 gene comprises, from the 5′ to 3′ direction, a 5′ homology arm, a replacement sequence, and a 3′ homology arm. In certain of these embodiments, the replacement sequence for correcting c.1024G>A comprises or consists of guanine-adenine-guanine (GAG) or guanine-adenine-adenine (GAA). In certain embodiments, the 5′ and 3′ homology arms each comprise a length of sequence flanking the Z mutation. For example, the 5′ homology arm may comprise all or a portion of the sequence from 1 to 2000 bp upstream of the Z mutation (i.e., nucleotides 11990 to 13989 of SEQ ID NO:2231), while the 3′ homology arm may comprise all or a portion of the sequence from 1 to 2000 bp downstream of the Z mutation (i.e., nucleotides 13991 to 15991 of SEQ ID NO:2231). In other embodiments, 5′ and 3′ homology arms for correcting c.1024G>A may each comprise a sequence flanking the most distal gRNAs. For example, the 5′ and 3′ homology arms may each comprise all or a portion of about 2000 bp of sequence flanking the most distal gRNAs. Shorter 5′ and/or 3′ homology arms may also be used. For example, it is contemplated herein that one or both homology arms may be shortened to avoid including certain sequence repeat elements, e.g., Alu repeats, LINE elements. For example, a 5′ homology arm may be shortened to avoid a sequence repeat element. In other embodiments, a 3′ homology arm may be shortened to avoid a sequence repeat element. In some embodiments, both the 5′ and the 3′ homology arms may be shortened to avoid including certain sequence repeat elements.

[0795] In certain embodiments, a template nucleic acid for correcting a c.1024G>A mutation (Z mutation) in the human SERPINA1 gene comprises a 5′ homology arm and a 3′ homology arm. In certain embodiments, the 5′ and 3′ homology arms each comprise a length of sequence flanking the c.1024G>A mutation. In certain of these embodiments, the 5′ homology arm and 3′ homology arm comprises or consists of guanine-adenine-guanine (GAG) or guanine-adenine-adenine (GAA) for correcting the c.1024G>A mutation. In certain embodiments, the template nucleic acid may comprise a single-stranded oligodeoxynucleotide (ssODN). In certain embodiments, the template nucleic acid has homology to the transcription strand of the target sequence. In certain embodiments, the template nucleic acid comprises, consists of, or consists essentially of a sequence from a transcription strand of the target sequence (e.g., minus strand of Chromosome 14, transcription strand of the SERPINA1 locus). In certain embodiments, the template nucleic acid comprises, e.g., at least 1, 2, 3, 4, 5, 10, 20, or 30 single nucleotide polymorphisms (SNPs). In certain embodiments, the template nucleic acid comprises a 5′ homology arm that extends 5′ from the break (e.g., nick or double-strand break) in the target nucleic acid and a 3′ homology arm that extends 3′ from the break (e.g., nick or double-strand break). In certain embodiments, the 5′ homology arm may be longer in length than the 3′ homology arm. In certain embodiments, the 5′ homology arm to 3′ homology arm asymmetry relative to the break (e.g., nick or double-strand break) is 75%:25% (length of 5′ homology arm: length of 3′ homology arm), 74%:26%, 73%:27%, 72%:28%, 71%:29%, 70%:30%, 69%:31%, 68%:32%, 67%:33%, 66%:34%, 65%:35%, 64%:36%, 63%:37%, 62%:38%, 61%:39%, 60%:40%, 59%:41%, 58%:42%, 57%:43%, 56%:44%, 55%:45%, 54%:46%, 53%:47%, 52%:48%, 51%:49%, 50%:50%, 49%:51%, 48%:52%, 47%:53%, 46%:54%, 45%:55%, 44%:56%, 43%:57%, 42%:58%, 41%:59%, or 40%:60%. In certain embodiments, the template nucleic acid comprises, consists essentially of, or consists of a 5′ homology arm that extends about 125, about 120, about 115, about 110, about 105, about 100, about 95, about 90, about 85, about 80 nucleotides, 5′ from the break (e.g., nick or double-strand break). In certain embodiments, the template nucleic acid comprises, consists essentially of, or consists of a 3′ nucleotide sequence that extends about 40, about 45, about 50, about 55, about 60, about 65, about 70, about 75, about 80, about 85 nucleotides 3′ from the break (e.g., nick or double-strand break). In certain embodiments, the template nucleic acid comprises, consists essentially of, or consists of a 5′ nucleotide sequence that extends about 85-95 nucleotides 5′ from the break (e.g., nick or double-strand break). In certain embodiments, the template nucleic acid comprises, consists essentially of, or consists of a 3′ nucleotide sequence that extends about 60-70 nucleotides 3′ from the break (e.g., nick or double-strand break). In certain embodiments, the 5′ homology arm comprises, consists essentially of, or consists of SEQ ID NO:2208 (i.e., ssODN_1/ssODN_1_Z mutation 5′ homology arm). In certain embodiments, the 3′ homology arm comprises, consists essentially of, or consists of SEQ ID NO:2209 (i.e., ssODN_1/ssODN_1_Z mutation 3′ homology arm). In certain embodiments, the template nucleic acid comprises, consists essentially of, or consists of SEQ ID NO:2228 (i.e., ssODN_1_Z mutation). In certain embodiments, the template nucleic acid comprises, consists essentially of, or consists of a 5′ homology arm that extends about 95-105 nucleotides 5′ from the break (e.g., nick or double-strand break). In certain embodiments, the template nucleic acid comprises, consists essentially of, or consists of a 3′ homology arm that extends about 60-70 nucleotides 3′ from the break (e.g., nick or double-strand break). In certain embodiments, the 5′ homology arm comprises, consists essentially of, or consists of SEQ ID NO:2211 (i.e., ssODN_2/ssODN_2_Z mutation 5′ homology arm). In certain embodiments, the 3′ homology arm comprises, consists essentially of, or consists of SEQ ID NO:2212 (i.e., ssODN_2/ssODN_2_Z mutation 3′ homology arm). In certain embodiments, the template nucleic acid sequence comprises, consists essentially of, or consists of SEQ ID NO:2229 (i.e., ssODN_2_Z mutation).

[0796] As indicated in Table 13, the ssODNs of SEQ ID NO:2228 (i.e., ssODN_1_Z mutation) and SEQ ID NO:2229 (i.e., ssODN_2_Z mutation) each contain single nucleotide polymorphisms (SNPs). As described in Example 6, there are four sets of SNPs present in the ssODNs resulting in ten mutations: (1) the first set introduces the Z-mutation (GAG>AAA as shown in the bold and shaded sequence in Table 13), (2) the second set introduces an MfeI restriction site on the target sequence to quantify HDR efficiency using a restriction fragment length polymorphism (RFLP) assay, which also disrupts the recognition of the PAM sequence of sgRNA1889 and the genomic DNA post HDR events (underscored and lowercase letters in Table 13), (3) the third set disrupts the recognition of the PAM sequence of sgRNA1889 and the genomic DNA post HDR events (bold and italicized nucleotides in Table 13), and (4) the fourth set prevents gRNA re-recognition and Cas9 re-cutting post HDR events (underscored nucleotides in Table 13). In certain embodiments, the template nucleic acid may comprise SEQ ID NO:2228 (i.e., ssODN_1_Z mutation) or SEQ ID NO:2229 (i.e., ssODN_2_Z mutation), lacking one or more SNPs presented in Table 13. For example, the template nucleic acid may comprise SEQ ID NO:2228 (i.e., ssODN_1_Z mutation) or SEQ ID NO:2229 (i.e., ssODN_2_Z mutation), wherein one or more SNPs is removed from the template nucleic acid and mutated back to the corresponding nucleotide of the transcription strand of the SERPINA1 locus.

[0797] Suitable promoter sequences can be a constitutive promoter, a tissue-specific promoter, and/or a synthetic promoter with or without enhancer sequence(s).

[0798] In certain embodiments, a template nucleic acid comprises a replacement sequence flanked by a 5′ homology arm and a 3′ homology arm each independently comprising 10 or more, 20 or more, 50 or more, 100 or more, 150 or more, 200 or more, 250 or more, 300 or more, 350 or more, 400 or more, 450 or more, 500 or more, 550 or more, 600 or more, 650 or more, 700 or more, 750 or more, 800 or more, 850 or more, 900 or more, 1000 or more, 1100 or more, 1200 or more, 1300 or more, 1400 or more, 1500 or more, 1600 or more, 1700 or more, 1800 or more, 1900 or more, or 2000 or more nucleotides. In certain embodiments, a template nucleic acid comprises a replacement sequence flanked by a 5′ homology arm and a 3′ homology arm each independently comprising at least 50, 100, or 150 nucleotides, but not long enough to include a repeated element. In certain embodiments, a template nucleic acid comprises a replacement sequence flanked by a 5′ homology arm and a 3′ homology arm each independently comprising 5 to 100, 10 to 150, or 20 to 150 nucleotides. In certain embodiments, a replacement sequence comprises G, A, or a cDNA sequence described herein, and optionally comprises a promoter and/or polyA signal.

### NHEJ Approaches for Gene Targeting

[0799] In certain embodiments of the methods provided herein, one or both alleles of the SERPINA1 gene are knocked out using NHEJ. As described herein, nuclease-induced NHEJ can be used to target gene-specific knockouts and remove (e.g., delete) sequences in a gene of interest.

[0800] While not wishing to be bound by theory, it is believed that, in certain embodiments, the genomic alterations associated with the methods described herein rely on nuclease-induced NHEJ and the error-prone nature of the NHEJ repair pathway. NHEJ repairs a double-strand break in the DNA by joining together the two ends; however, generally, the original sequence is restored only if two compatible ends, exactly as they were formed by the double-strand break, are perfectly ligated. The DNA ends of the double-strand break are frequently the subject of enzymatic processing, resulting in the addition or removal of nucleotides, at one or both strands, prior to rejoining of the ends. This results in the presence of insertion and/or deletion (indel) mutations in the DNA sequence at the site of the NHEJ repair. Two-thirds of these mutations typically alter the reading frame and, therefore, produce a non-functional protein. Additionally, mutations that maintain the reading frame, but which insert or delete a significant amount of sequence, can destroy functionality of the protein. This is locus dependent as mutations in critical functional domains are likely less tolerable than mutations in non-critical regions of the protein.

[0801] The indel mutations generated by NHEJ are unpredictable in nature; however, at a given break site certain indel sequences are favored and are over represented in the population, likely due to small regions of microhomology. The lengths of deletions can vary widely; they are most commonly in the 1-50 bp range, but can reach greater than 100-200 bp. Insertions tend to be shorter and often include short duplications of the sequence immediately surrounding the break site. However, it is possible to obtain large insertions, and in these cases, the inserted sequence has often been traced to other regions of the genome or to plasmid DNA present in the cells.

[0802] Because NHEJ is a mutagenic process, it can also be used to delete small sequence motifs (e.g., motifs less than or equal to 50 nucleotides in length) as long as the generation of a specific final sequence is not required. If a double-strand break is targeted near to a target sequence, the deletion mutations caused by the NHEJ repair often span, and therefore remove, the unwanted nucleotides. For the deletion of larger DNA segments, introducing two double-strand breaks, one on each side of the sequence, can result in NHEJ between the ends with removal of the entire intervening sequence. In this way, DNA segments as large as several hundred kilobases can be deleted. Both of these approaches can be used to delete specific DNA sequences; however, the error-prone nature of NHEJ may still produce indel mutations at the site of repair.

[0803] Both double strand cleaving eaCas9 molecules and single strand, or nickase, eaCas9 molecules can be used in the methods and compositions described herein to generate NHEJ-mediated indels. NHEJ-mediated indels targeted to the gene, e.g., a coding region, e.g., an early coding region of a gene, of interest can be used to knockout (i.e., eliminate expression of) a gene of interest. For example, early coding region of a gene of interest includes sequence immediately following a start codon, within a first exon of the coding sequence, or within 500 bp of the start codon (e.g., less than 500, 450, 400, 350, 300, 250, 200, 150, 100, or 50 bp).

### Placement of Double Strand or Single Strand Breaks Relative to the Target Position

[0804] In certain embodiments in which a gRNA and RNA-guided nuclease (e.g., Cas9 nuclease) generate a double strand break for the purpose of inducing NHEJ-mediated indels, a gRNA, e.g., a unimolecular (or chimeric) or modular gRNA molecule, is configured to position one double-strand break in close proximity to a nucleotide of the target position. In an embodiment, the cleavage site is between 0-30 bp away from the target position (e.g., less than 30, 25, 20, 15, 10, 9, 8, 7, 6, 5, 4, 3, 2, or 1 bp from the target position).

[0805] In certain embodiments, in which two gRNAs complexing with Cas9 nickases induce two single strand breaks for the purpose of inducing NHEJ-mediated indels, two gRNAs, e.g., independently, unimolecular (or chimeric) or modular gRNA, are configured to position two single-strand breaks to provide for NHEJ repair a nucleotide of the target position. In certain embodiments, the gRNAs are configured to position cuts at the same position, or within a few nucleotides of one another, on different strands, essentially mimicking a double strand break. In certain embodiments, the closer nick is between 0-30 bp away from the target position (e.g., less than 30, 25, 20, 15, 10, 9, 8, 7, 6, 5, 4, 3, 2, or 1 bp from the target position), and the two nicks are within 25-55 bp of each other (e.g., between 25 to 50, 25 to 45, 25 to 40, 25 to 35, 25 to 30, 50 to 55, 45 to 55, 40 to 55, 35 to 55, 30 to 55, 30 to 50, 35 to 50, 40 to 50, 45 to 50, 35 to 45, or 40 to 45 bp) and no more than 100 bp away from each other (e.g., no more than 90, 80, 70, 60, 50, 40, 30, 20, or 10 bp). In certain embodiments, the gRNAs are configured to place a single strand break on either side of a nucleotide of the target position.

[0806] Both double strand cleaving eaCas9 molecules and single strand, or nickase, eaCas9 molecules can be used in the methods and compositions described herein to generate breaks both sides of a target position. Double strand or paired single strand breaks may be generated on both sides of a target position to remove the nucleic acid sequence between the two cuts (e.g., the region between the two breaks in deleted). In certain embodiments, two gRNAs, e.g., independently, unimolecular (or chimeric) or modular gRNA, are configured to position a double-strand break on both sides of a target position. In other embodiments, three gRNAs, e.g., independently, unimolecular (or chimeric) or modular gRNA, are configured to position a double strand break (i.e., one gRNA complexes with a cas9 nuclease) and two single strand breaks or paired single strand breaks (i.e., two gRNAs complex with Cas9 nickases) on either side of the target position. In still other embodiments, four gRNAs, e.g., independently, unimolecular (or chimeric) or modular gRNA, are configured to generate two pairs of single strand breaks (i.e., two pairs of two gRNAs complex with Cas9 nickases) on either side of the target position. The double strand break(s) or the closer of the two single strand nicks in a pair will ideally be within 0-500 bp of the target position (e.g., no more than 450, 400, 350, 300, 250, 200, 150, 100, 50, or 25 bp from the target position). When nickases are used, the two nicks in a pair are within 25-55 bp of each other (e.g., between 25 to 50, 25 to 45, 25 to 40, 25 to 35, 25 to 30, 50 to 55, 45 to 55, 40 to 55, 35 to 55, 30 to 55, 30 to 50, 35 to 50, 40 to 50, 45 to 50, 35 to 45, or 40 to 45 bp) and no more than 100 bp away from each other (e.g., no more than 90, 80, 70, 60, 50, 40, 30, 20, or 10 bp).

### Single-Strand Annealing

[0807] Single strand annealing (SSA) is another DNA repair process that repairs a double-strand break between two repeat sequences present in a target nucleic acid. Repeat sequences utilized by the SSA pathway are generally greater than 30 nucleotides in length. Resection at the break ends occurs to reveal repeat sequences on both strands of the target nucleic acid. After resection, single strand overhangs containing the repeat sequences are coated with RPA protein to prevent the repeats sequences from inappropriate annealing, e.g., to themselves. RAD52 binds to and each of the repeat sequences on the overhangs and aligns the sequences to enable the annealing of the complementary repeat sequences. After annealing, the single-strand flaps of the overhangs are cleaved. New DNA synthesis fills in any gaps, and ligation restores the DNA duplex. As a result of the processing, the DNA sequence between the two repeats is deleted. The length of the deletion can depend on many factors including the location of the two repeats utilized, and the pathway or processivity of the resection.

[0808] In contrast to HDR pathways, SSA does not require a template nucleic acid to alter or correct a target nucleic acid sequence. Instead, the complementary repeat sequence is utilized.

### Other DNA Repair Pathways

### SSBR (Single Strand Break Repair)

[0809] Single-stranded breaks (SSB) in the genome are repaired by the SSBR pathway, which is a distinct mechanism from the DSB repair mechanisms discussed above. The SSBR pathway has four major stages: SSB detection, DNA end processing, DNA gap filling, and DNA ligation. A more detailed explanation is given in Caldecott 2008, and a summary is given here.

[0810] In the first stage, when a SSB forms, PARP1 and/or PARP2 recognize the break and recruit repair machinery. The binding and activity of PARP1 at DNA breaks is transient and it seems to accelerate SSBr by promoting the focal accumulation or stability of SSBr protein complexes at the lesion. Arguably the most important of these SSBr proteins is XRCC1, which functions as a molecular scaffold that interacts with, stabilizes, and stimulates multiple enzymatic components of the SSBr process including the protein responsible for cleaning the DNA 3′ and 5′ ends. For instance, XRCC1 interacts with several proteins (DNA polymerase beta, PNK, and three nucleases, APE1, APTX, and APLF) that promote end processing. APE1 has endonuclease activity. APLF exhibits endonuclease and 3′ to 5′ exonuclease activities. APTX has endonuclease and 3′ to 5′ exonuclease activity.

[0811] This end processing is an important stage of SSBR since the 3′- and/or 5′-termini of most, if not all, SSBs are ‘damaged.’ End processing generally involves restoring a damaged 3′-end to a hydroxylated state and and/or a damaged 5′ end to a phosphate moiety, so that the ends become ligation-competent. Enzymes that can process damaged 3′ termini include PNKP, APE1, and TDP1. Enzymes that can process damaged 5′ termini include PNKP, DNA polymerase beta, and APTX. LIG3 (DNA ligase III) can also participate in end processing. Once the ends are cleaned, gap filling can occur.

[0812] At the DNA gap filling stage, the proteins typically present are PARP1, DNA polymerase beta, XRCC1, FEN1 (flap endonuclease 1), DNA polymerase delta/epsilon, PCNA, and LIG1. There are two ways of gap filling, the short patch repair and the long patch repair. Short patch repair involves the insertion of a single nucleotide that is missing. At some SSBs, “gap filling” might continue displacing two or more nucleotides (displacement of up to 12 bases have been reported). FEN1 is an endonuclease that removes the displaced 5′-residues. Multiple DNA polymerases, including Pols, are involved in the repair of SSBs, with the choice of DNA polymerase influenced by the source and type of SSB.

[0813] In the fourth stage, a DNA ligase such as LIG1 (Ligase I) or LIG3 (Ligase III) catalyzes joining of the ends. Short patch repair uses Ligase III and long patch repair uses Ligase I.

[0814] Sometimes, SSBR is replication-coupled. This pathway can involve one or more of CtIP, MRN, ERCC1, and FEN1. Additional factors that may promote SSBR include: aPARP, PARP1, PARP2, PARG, XRCC1, DNA polymerase b, DNA polymerase d, DNA polymerase e, PCNA, LIG1, PNK, PNKP, APE1, APTX, APLF, TDP1, LIG3, FEN1, CtIP, MRN, and ERCC1.

### MMR (Mismatch Repair)

[0815] Cells contain three excision repair pathways: MMR, BER, and NER. The excision repair pathways have a common feature in that they typically recognize a lesion on one strand of the DNA, then exo/endonucleases remove the lesion and leave a 1-30 nucleotide gap that is sub-sequentially filled in by DNA polymerase and finally sealed with ligase. A more complete picture is given in Li 2008, and a summary is provided here.

[0816] Mismatch repair (MMR) operates on mispaired DNA bases.

[0817] The MSH2/6 or MSH2/3 complexes both have ATPases activity that plays an important role in mismatch recognition and the initiation of repair. MSH2/6 preferentially recognizes base-base mismatches and identifies mispairs of 1 or 2 nucleotides, while MSH2/3 preferentially recognizes larger ID mispairs.

[0818] hMLH1 heterodimerizes with hPMS2 to form hMutLα which possesses an ATPase activity and is important for multiple steps of MMR. It possesses a PCNA/replication factor C (RFC)-dependent endonuclease activity which plays an important role in 3′ nick-directed MMR involving EXO1 (EXO1 is a participant in both HR and MMR.) It regulates termination of mismatch-provoked excision. Ligase I is the relevant ligase for this pathway. Additional factors that may promote MMR include: EXO1, MSH2, MSH3, MSH6, MLH1, PMS2, MLH3, DNA Pol d, RPA, HMGB1, RFC, and DNA ligase I.

### Base Excision Repair (BER)

[0819] The base excision repair (BER) pathway is active throughout the cell cycle; it is responsible primarily for removing small, non-helix-distorting base lesions from the genome. In contrast, the related Nucleotide Excision Repair pathway (discussed in the next section) repairs bulky helix-distorting lesions. A more detailed explanation is given in Caldecott 2008, and a summary is given here.

[0820] Upon DNA base damage, base excision repair (BER) is initiated and the process can be simplified into five major steps: (a) removal of the damaged DNA base; (b) incision of the subsequent a basic site; (c) clean-up of the DNA ends; (d) insertion of the correct nucleotide into the repair gap; and (e) ligation of the remaining nick in the DNA backbone. These last steps are similar to the SSBR.

[0821] In the first step, a damage-specific DNA glycosylase excises the damaged base through cleavage of the N-glycosidic bond linking the base to the sugar phosphate backbone. Then AP endonuclease-1 (APE1) or bifunctional DNA glycosylases with an associated lyase activity incised the phosphodiester backbone to create a DNA single strand break (SSB). The third step of BER involves cleaning-up of the DNA ends. The fourth step in BER is conducted by Pols that adds a new complementary nucleotide into the repair gap and in the final step XRCC1/Ligase III seals the remaining nick in the DNA backbone. This completes the short-patch BER pathway in which the majority (˜80%) of damaged DNA bases are repaired. However, if the 5′-ends in step 3 are resistant to end processing activity, following one nucleotide insertion by Pol β there is then a polymerase switch to the replicative DNA polymerases, Pol δ/ε, which then add ˜2-8 more nucleotides into the DNA repair gap. This creates a 5′ flap structure, which is recognized and excised by flap endonuclease-1 (FEN-1) in association with the processivity factor proliferating cell nuclear antigen (PCNA). DNA ligase I then seals the remaining nick in the DNA backbone and completes long-patch BER. Additional factors that may promote the BER pathway include: DNA glycosylase, APE1, Polb, Pold, Pole, XRCC1, Ligase III, FEN-1, PCNA, RECQL4, WRN, MYH, PNKP, and APTX.

### Nucleotide Excision Repair (NER)

[0822] Nucleotide excision repair (NER) is an important excision mechanism that removes bulky helix-distorting lesions from DNA. Additional details about NER are given in Marteijn 2014, and a summary is given here. NER a broad pathway encompassing two smaller pathways: global genomic NER (GG-NER) and transcription coupled repair NER (TC-NER). GG-NER and TC-NER use different factors for recognizing DNA damage. However, they utilize the same machinery for lesion incision, repair, and ligation.

[0823] Once damage is recognized, the cell removes a short single-stranded DNA segment that contains the lesion. Endonucleases XPF/ERCC1 and XPG (encoded by ERCC5) remove the lesion by cutting the damaged strand on either side of the lesion, resulting in a single-strand gap of 22-30 nucleotides. Next, the cell performs DNA gap filling synthesis and ligation. Involved in this process are: PCNA, RFC, DNA Pol δ, DNA Pol ε or DNA Pol κ, and DNA ligase I or XRCC1/Ligase III. Replicating cells tend to use DNA pol E and DNA ligase I, while non-replicating cells tend to use DNA Pol δ, DNA Pol κ, and the XRCC1/Ligase III complex to perform the ligation step.

[0824] NER can involve the following factors: XPA-G, POLH, XPF, ERCC1, XPA-G, and LIG1. Transcription-coupled NER (TC-NER) can involve the following factors: CSA, CSB, XPB, XPD, XPG, ERCC1, and TTDA. Additional factors that may promote the NER repair pathway include XPA-G, POLH, XPF, ERCC1, XPA-G, LIG1, CSA, CSB, XPA, XPB, XPC, XPD, XPF, XPG, TTDA, UVSSA, USP7, CETN2, RAD23B, UV-DDB, CAK subcomplex, RPA, and PCNA.

### Interstrand Crosslink (ICL)

[0825] A dedicated pathway called the ICL repair pathway repairs interstrand crosslinks. Interstrand crosslinks, or covalent crosslinks between bases in different DNA strand, can occur during replication or transcription. ICL repair involves the coordination of multiple repair processes, in particular, nucleolytic activity, translesion synthesis (TLS), and HDR. Nucleases are recruited to excise the ICL on either side of the crosslinked bases, while TLS and HDR are coordinated to repair the cut strands. ICL repair can involve the following factors: endonucleases, e.g., XPF and RAD51C, endonucleases such as RAD51, translesion polymerases, e.g., DNA polymerase zeta and Rev1), and the Fanconi anemia (FA) proteins, e.g., FancJ.

### Other Pathways

### Several Other DNA Repair Pathways Exist in Mammals.

[0826] Translesion synthesis (TLS) is a pathway for repairing a single stranded break left after a defective replication event and involves translesion polymerases, e.g., DNA pols and Rev1.

[0827] Error-free postreplication repair (PRR) is another pathway for repairing a single stranded break left after a defective replication event.

Examples of gRNAs in Genome Editing Methods

[0828] gRNA molecules as described herein can be used with Cas9 molecules that generate a double strand break or a single strand break to alter the sequence of a target nucleic acid, e.g., a target position or target genetic signature. gRNA molecules useful in these methods are described below.

[0829] In certain embodiments, the gRNA, e.g., a chimeric gRNA, is configured such that it comprises one or more of the following properties:
[0830] (a) it can position, e.g., when targeting a Cas9 molecule that makes double strand breaks, a double strand break (i) within 50, 100, 150, 200, 250, 300, 350, 400, 450, or 500 nucleotides of a target position, or (ii) sufficiently close that the target position is within the region of end resection;
[0831] (b) it has a targeting domain of at least 16 nucleotides, e.g., a targeting domain of (i) 16, (ii), 17, (iii) 18, (iv) 19, (v) 20, (vi) 21, (vii) 22, (viii) 23, (ix) 24, (x) 25, or (xi) 26 nucleotides; and
[0832] (c)(i) the proximal and tail domain, when taken together, comprise at least 15, 18, 20, 25, 30, 31, 35, 40, 45, 49, 50, or 53 nucleotides, e.g., at least 15, 18, 20, 25, 30, 31, 35, 40, 45, 49, 50, or 53 nucleotides from a naturally occurring S. pyogenes, S. thermophilus or S. aureus tail and proximal domain, or a sequence that differs by no more than 1, 2, 3, 4, 5, 6, 7, 8, 9, or 10 nucleotides therefrom;
[0833] (c)(ii) there are at least 15, 18, 20, 25, 30, 31, 35, 40, 45, 49, 50, or 53 nucleotides 3′ to the last nucleotide of the second complementarity domain, e.g., at least 15, 18, 20, 25, 30, 31, 35, 40, 45, 49, 50, or 53 nucleotides from the corresponding sequence of a naturally occurring S. pyogenes, S. thermophilus, or S. aureus gRNA, or a sequence that differs by no more than 1, 2, 3, 4, 5, 6, 7, 8, 9 or 10 nucleotides therefrom;
[0834] (c)(iii) there are at least 16, 19, 21, 26, 31, 32, 36, 41, 46, 50, 51, or 54 nucleotides 3′ to the last nucleotide of the second complementarity domain that is complementary to its corresponding nucleotide of the first complementarity domain, e.g., at least 16, 19, 21, 26, 31, 32, 36, 41, 46, 50, 51, or 54 nucleotides from the corresponding sequence of a naturally occurring S. pyogenes, S. thermophilus, or S. aureus gRNA, or a sequence that differs by no more than 1, 2, 3, 4, 5, 6, 7, 8, 9 or 10 nucleotides therefrom;
[0835] (c)(iv) the tail domain is at least 10, 15, 20, 25, 30, 35 or 40 nucleotides in length, e.g., it comprises at least 10, 15, 20, 25, 30, 35 or 40 nucleotides from a naturally occurring S. pyogenes, S. thermophilus, or S. aureus tail domain, or a sequence that differs by no more than 1, 2, 3, 4, 5, 6, 7, 8, 9, or 10 nucleotides therefrom; or
[0836] (c)(v) the tail domain comprises 15, 20, 25, 30, 35, 40 nucleotides or all of the corresponding portions of a naturally occurring tail domain, e.g., a naturally occurring S. pyogenes, S. thermophilus, or S. aureus tail domain.

[0837] In certain embodiments, the gRNA is configured such that it comprises properties a and b(i); a and b(ii); a and b(iii); a and b(iv); a and b(v); a and b(vi); a and b(vii); a and b(viii); a and b(ix); a and b(x); a and b(xi); a and c; a, b, and c; a(i), b(i), and c(i); a(i), b(i), and c(ii); a(i), b(ii), and c(i); a(i), b(ii), and c(ii); a(i), b(iii), and c(i); a(i), b(iii), and c(ii); a(i), b(iv), and c(i); a(i), b(iv), and c(ii); a(i), b(v), and c(i); a(i), b(v), and c(ii); a(i), b(vi), and c(i); a(i), b(vi), and c(ii); a(i), b(vii), and c(i); a(i), b(vii), and c(ii); a(i), b(viii), and c(i); a(i), b(viii), and c(ii); a(i), b(ix), and c(i); a(i), b(ix), and c(ii); a(i), b(x), and c(i); a(i), b(x), and c(ii); a(i), b(xi), or c(i); a(i), b(xi), and c(ii).

[0838] In certain embodiments, the gRNA, e.g., a chimeric gRNA, is configured such that it comprises one or more of the following properties:
[0839] (a) one or both of the gRNAs can position, e.g., when targeting a Cas9 molecule that makes single strand breaks, a single strand break within (i) 50, 100, 150, 200, 250, 300, 350, 400, 450, or 500 nucleotides of a target position, or (ii) sufficiently close that the target position is within the region of end resection;
[0840] (b) one or both have a targeting domain of at least 16 nucleotides, e.g., a targeting domain of (i) 16, (ii), 17, (iii) 18, (iv) 19, (v) 20, (vi) 21, (vii) 22, (viii) 23, (ix) 24, (x) 25, or (xi) 26 nucleotides; and
[0841] (c)(i) the proximal and tail domain, when taken together, comprise at least 15, 18, 20, 25, 30, 31, 35, 40, 45, 49, 50, or 53 nucleotides, e.g., at least 15, 18, 20, 25, 30, 31, 35, 40, 45, 49, 50, or 53 nucleotides from a naturally occurring S. pyogenes, S. thermophilus, or S. aureus tail and proximal domain, or a sequence that differs by no more than 1, 2, 3, 4, 5, 6, 7, 8, 9 or 10 nucleotides therefrom;
[0842] (c)(ii) there are at least 15, 18, 20, 25, 30, 31, 35, 40, 45, 49, 50, or 53 nucleotides 3′ to the last nucleotide of the second complementarity domain, e.g., at least 15, 18, 20, 25, 30, 31, 35, 40, 45, 49, 50, or 53 nucleotides from the corresponding sequence of a naturally occurring S. pyogenes, S. thermophilus, or S. aureus gRNA, or a sequence that differs by no more than 1, 2, 3, 4, 5, 6, 7, 8, 9 or 10 nucleotides therefrom;
[0843] (c)(iii) there are at least 16, 19, 21, 26, 31, 32, 36, 41, 46, 50, 51, or 54 nucleotides 3′ to the last nucleotide of the second complementarity domain that is complementary to its corresponding nucleotide of the first complementarity domain, e.g., at least 16, 19, 21, 26, 31, 32, 36, 41, 46, 50, 51, or 54 nucleotides from the corresponding sequence of a naturally occurring S. pyogenes, S. thermophilus, or S. aureus gRNA, or a sequence that differs by no more than 1, 2, 3, 4, 5, 6, 7, 8, 9, or 10 nucleotides therefrom;
[0844] (c)(iv) the tail domain is at least 10, 15, 20, 25, 30, 35 or 40 nucleotides in length, e.g., it comprises at least 10, 15, 20, 25, 30, 35 or 40 nucleotides from a naturally occurring S. pyogenes, S. thermophilus, or S. aureus tail domain, or a sequence that differs by no more than 1, 2, 3, 4, 5, 6, 7, 8, 9 or 10 nucleotides therefrom; or
[0845] (c)(v) the tail domain comprises 15, 20, 25, 30, 35, or 40 nucleotides or all of the corresponding portions of a naturally occurring tail domain, e.g., a naturally occurring S. pyogenes, S. thermophilus, or S. aureus tail domain.

[0846] In certain embodiments, the gRNA is configured such that it comprises properties a and b(i); a and b(ii); a and b(iii); a and b(iv); a and b(v); a and b(vi); a and b(vii); a and b(viii); a and b(ix); a and b(x); a and b(xi); a and c; a, b, and c; a(i), b(i), and c(i); a(i), b(i), and c(ii); a(i), b(ii), and c(i); a(i), b(ii), and c(ii); a(i), b(iii), and c(i); a(i), b(iii), and c(ii); a(i), b(iv), and c(i); a(i), b(iv), and c(ii); a(i), b(v), and c(i); a(i), b(v), and c(ii); a(i), b(vi), and c(i); a(i), b(vi), and c(ii); a(i), b(vii), and c(i); a(i), b(vii), and c(ii); a(i), b(viii), and c(i); a(i), b(viii), and c(ii); a(i), b(ix), and c(i); a(i), b(ix), and c(ii); a(i), b(x), and c(i); a(i), b(x), and c(ii); a(i), b(xi), and c(i); a(i), b(xi), and c(ii).

[0847] In certain embodiments, the gRNA is used with a Cas9 nickase molecule having HNH activity, e.g., a Cas9 molecule having the RuvC activity inactivated, e.g., a Cas9 molecule having a mutation at D10, e.g., the D10A mutation.

[0848] In an embodiment, the gRNA is used with a Cas9 nickase molecule having RuvC activity, e.g., a Cas9 molecule having the HNH activity inactivated, e.g., a Cas9 molecule having a mutation at 840, e.g., the H840A.

[0849] In an embodiment, the gRNAs are used with a Cas9 nickase molecule having RuvC activity, e.g., a Cas9 molecule having the HNH activity inactivated, e.g., a Cas9 molecule having a mutation at N863, e.g., the N863A mutation.

[0850] In an embodiment, a pair of gRNAs, e.g., a pair of chimeric gRNAs, comprising a first and a second gRNA, is configured such that they comprises one or more of the following properties:
[0851] (a) one or both of the gRNAs can position, e.g., when targeting a Cas9 molecule that makes single strand breaks, a single strand break within (i) 50, 100, 150, 200, 250, 300, 350, 400, 450, or 500 nucleotides of a target position, or (ii) sufficiently close that the target position is within the region of end resection;
[0852] (b) one or both have a targeting domain of at least 16 nucleotides, e.g., a targeting domain of (i) 16, (ii), 17, (iii) 18, (iv) 19, (v) 20, (vi) 21, (vii) 22, (viii) 23, (ix) 24, (x) 25, or (xi) 26 nucleotides;
[0853] (c)(i) the proximal and tail domain, when taken together, comprise at least 15, 18, 20, 25, 30, 31, 35, 40, 45, 49, 50, or 53 nucleotides, e.g., at least 15, 18, 20, 25, 30, 31, 35, 40, 45, 49, 50, or 53 nucleotides from a naturally occurring S. pyogenes, S. thermophilus, or S. aureus tail and proximal domain, or a sequence that differs by no more than 1, 2, 3, 4, 5, 6, 7, 8, 9, or 10 nucleotides therefrom;
[0854] (c)(ii) there are at least 15, 18, 20, 25, 30, 31, 35, 40, 45, 49, 50, or 53 nucleotides 3′ to the last nucleotide of the second complementarity domain, e.g., at least 15, 18, 20, 25, 30, 31, 35, 40, 45, 49, 50, or 53 nucleotides from the corresponding sequence of a naturally occurring S. pyogenes, S. thermophilus, or S. aureus gRNA, or a sequence that differs by no more than 1, 2, 3, 4, 5, 6, 7, 8, 9, or 10 nucleotides therefrom;
[0855] (c)(iii) there are at least 16, 19, 21, 26, 31, 32, 36, 41, 46, 50, 51, or 54 nucleotides 3′ to the last nucleotide of the second complementarity domain that is complementary to its corresponding nucleotide of the first complementarity domain, e.g., at least 16, 19, 21, 26, 31, 32, 36, 41, 46, 50, 51, or 54 nucleotides from the corresponding sequence of a naturally occurring S. pyogenes, S. thermophilus, or S. aureus gRNA, or a sequence that differs by no more than 1, 2, 3, 4, 5, 6, 7, 8, 9 or 10 nucleotides therefrom;
[0856] (c)(iv) the tail domain is at least 10, 15, 20, 25, 30, 35 or 40 nucleotides in length, e.g., it comprises at least 10, 15, 20, 25, 30, 35 or 40 nucleotides from a naturally occurring S. pyogenes, S. thermophilus, or S. aureus tail domain; or, or a sequence that differs by no more than 1, 2, 3, 4, 5, 6, 7, 8, 9, or 10 nucleotides therefrom; or
[0857] (c)(v) the tail domain comprises 15, 20, 25, 30, 35, or 40 nucleotides or all of the corresponding portions of a naturally occurring tail domain, e.g., a naturally occurring S. pyogenes, S. thermophilus, or S. aureus tail domain;
[0858] (d) the gRNAs are configured such that, when hybridized to target nucleic acid, they are separated by 0-50, 0-100, 0-200, at least 10, at least 20, at least 30 or at least 50 nucleotides;
[0859] (e) the breaks made by the first gRNA and second gRNA are on different strands; and
[0860] (f) the PAMs are facing outwards.

[0861] In certain embodiments, one or both of the gRNAs is configured such that it comprises properties a and b(i); a and b(ii); a and b(iii); a and b(iv); a and b(v); a and b(vi); a and b(vii); a and b(viii); a and b(ix); a and b(x); a and b(xi); a and c; a, b, and c; a(i), b(i), and c(i); a(i), b(i), and c(ii); a(i), b(i), c, and d; a(i), b(i), c, and e; a(i), b(i), c, d, and e; a(i), b(ii), and c(i); a(i), b(ii), and c(ii); a(i), b(ii), c, and d; a(i), b(ii), c, and e; a(i), b(ii), c, d, and e; a(i), b(iii), and c(i); a(i), b(iii), and c(ii); a(i), b(iii), c, and d; a(i), b(iii), c, and e; a(i), b(iii), c, d, and e; a(i), b(iv), and c(i); a(i), b(iv), and c(ii); a(i), b(iv), c, and d; a(i), b(iv), c, and e; a(i), b(iv), c, d, and e; a(i), b(v), and c(i); a(i), b(v), and c(ii); a(i), b(v), c, and d; a(i), b(v), c, and e; a(i), b(v), c, d, and e; a(i), b(vi), and c(i); a(i), b(vi), and c(ii); a(i), b(vi), c, and d; a(i), b(vi), c, and e; a(i), b(vi), c, d, and e; a(i), b(vii), and c(i); a(i), b(vii), and c(ii); a(i), b(vii), c, and d; a(i), b(vii), c, and e; a(i), b(vii), c, d, and e; a(i), b(viii), and c(i); a(i), b(viii), and c(ii); a(i), b(viii), c, and d; a(i), b(viii), c, and e; a(i), b(viii), c, d, and e; a(i), b(ix), and c(i); a(i), b(ix), and c(ii); a(i), b(ix), c, and d; a(i), b(ix), c, and e; a(i), b(ix), c, d, and e; a(i), b(x), and c(i); a(i), b(x), and c(ii); a(i), b(x), c, and d; a(i), b(x), c, and e; a(i), b(x), c, d, and e; a(i), b(xi), and c(i); a(i), b(xi), and c(ii); a(i), b(xi), c, and d; a(i), b(xi), c, and e; a(i), b(xi), c, d, and e.

[0862] In certain embodiments, the gRNAs are used with a Cas9 nickase molecule having HNH activity, e.g., a Cas9 molecule having the RuvC activity inactivated, e.g., a Cas9 molecule having a mutation at D10, e.g., the D10A mutation.

[0863] In certain embodiments, the gRNAs are used with a Cas9 nickase molecule having RuvC activity, e.g., a Cas9 molecule having the HNH activity inactivated, e.g., a Cas9 molecule having a mutation at H840, e.g., the H840A mutation.

[0864] In certain embodiments, the gRNAs are used with a Cas9 nickase molecule having RuvC activity, e.g., a Cas9 molecule having the HNH activity inactivated, e.g., a Cas9 molecule having a mutation at N863, e.g., the N863A mutation.

### Target Cells

[0865] RNA-guided nucleases (e.g., Cas9 molecules) and gRNA molecules, e.g., an RNA-guided nuclease (e.g., Cas9 molecule)/gRNA molecule complex, can be used to alter (e.g., introduce a mutation in) a target nucleic acid, e.g., the SERPINA1 target gene, in a wide variety of cells. In certain embodiments, alteration of a target nucleic acid in a target cell may be performed in vitro, ex vivo or in vivo.

[0866] The RNA-guided nuclease (e.g., Cas9 molecules) and gRNA molecules described herein can be delivered to a target cell. In certain embodiments, the target cell is a hepatocyte. In other embodiments, the target cell is a lung epithelial cell. In certain embodiments, the target cell is a circulating blood cell, e.g., a monocyte, a mononuclear phagocyte, a macrophage, an alveolar macrophage, a myeloid progenitor cell, or a hematopoietic stem cell. In certain embodiments, the target cell is a bone marrow cell, (e.g., a myeloid progenitor cell, a hematopoietic stem cell, or a mesenchymal stem cell). In an embodiment, the target cell is a myeloid progenitor cell (e.g., a common myeloid progenitor (CMP) cell). In certain embodiments, the target cell is a hematopoietic stem cell (e.g., a long term hematopoietic stem cell (LT-HSC), a short term hematopoietic stem cell (ST-HSC), a multipotent progenitor (MPP) cell, a lineage restricted progenitor (LRP) cell).

[0867] In certain embodiments, the methods provided herein comprise treating a cell ex vivo and returning the cell to a patient. In certain embodiments, an autologous or heterologous stem cell can be treated ex vivo and returned to the subject. In certain embodiments, an autologous hepatocyte, heterologous hepatocyte, lung epithelium cell, mononuclear phagocyte, alveolar macrophage, myeloid precursor cell, or any combination thereof is treated ex vivo and returned to (e.g., transplanted into) the subject.

[0868] In certain embodiments, the target cell is manipulated ex vivo by editing (e.g., introducing a mutation in) the SERPINA1 target gene and/or modulating the expression of the SERPINA1 target gene, and administered to the subject. Sources of target cells for ex vivo manipulation may include, by way of example, the subject's blood, the subject's cord blood, or the subject's bone marrow. Sources of target cells for ex vivo manipulation may also include, by way of example, heterologous donor blood, cord blood, or bone marrow.

[0869] In certain embodiments, a hepatocyte is removed from the subject, manipulated ex vivo as described above, and returned to the subject. In certain embodiments, a myeloid progenitor cell is removed from the subject, manipulated ex vivo as described above, and returned to the subject. In certain embodiments, an alveolar macrophage is removed from the subject, manipulated ex vivo as described above, and returned to the subject. In certain embodiments, a macrophage is removed from the subject, manipulated ex vivo as described above, and returned to the subject. In certain embodiments, a lung epithelial cell is removed from the subject, manipulated ex vivo as described above, and returned to the subject. In certain embodiments, a hematopoietic stem cell is removed from the subject, manipulated ex vivo as described above, and returned to the subject.

[0870] A suitable cell can also include a stem cell such as, e.g., an embryonic stem cell, induced pluripotent stem cell, hematopoietic stem cell, neuronal stem cell, or mesenchymal stem cell. In certain embodiments, the cell is an induced pluripotent stem (iPS) cell or a cell derived from an iPS cell, e.g., an iPS cell generated from the subject, modified to correct the mutation, and differentiated into a clinically relevant cell such as, e.g., a hepatocyte, macrophage, mononuclear phagocyte, alveolar macrophage, myeloid progenitor cell, lung epithelial cell, or hematopoietic stem cell. In certain embodiments, AAV is used to transduce the target cells.

[0871] Cells produced by the methods described herein may be used immediately. Alternatively, the cells may be frozen (e.g., in liquid nitrogen) and stored for later use. The cells will usually be frozen in 10% dimethylsulfoxide (DMSO), 50% serum, 40% buffered medium, or some other such solution as is commonly used in the art to preserve cells at such freezing temperature, and thawed in such a manner as commonly known in the art for thawing frozen cultured cells.

### Delivery, Formulations, and Mutes of Administration

[0872] CRISPR/RNA-guided nuclease system components, e.g., a Cas9 molecule, a gRNA molecule (e.g., a Cas9 molecule/gRNA molecule complex), a donor template nucleic acid, or all three, can be delivered, formulated, or administered in a variety of forms, see, e.g., Tables 3 and 4. Table 3 provides examples of how the components can be formulated, delivered, or administered. Table 4 summarizes various delivery methods for the components of a CRISPR/RNA-guided nuclease system, e.g., a Cas9 molecule component and a gRNA molecule component, as described herein.

[0873] In certain embodiments, one Cas9 molecule and two or more (e.g., 2, 3, 4, or more) different gRNA molecules are delivered, e.g., by an AAV vector. In certain embodiments, the sequence encoding the Cas9 molecule and the sequence(s) encoding the two or more (e.g., 2, 3, 4, or more) different gRNA molecules are present on the same nucleic acid molecule, e.g., an AAV vector. When a Cas9 or gRNA component is delivered encoded in DNA the DNA will typically include a control region, e.g., comprising a promoter, to effect expression. Useful promoters for Cas9 molecule sequences include CMV, EFS, EF-1a, MSCV, PGK, CAG, ALB, and SERPINA1 promoters. In an embodiment, the promoter is a constitutive promoter. In another embodiment, the promoter is a tissue specific promoter. Useful promoters for gRNAs include H1, EF-1a U6, and tRNA promoters. Promoters with similar or dissimilar strengths can be selected to tune the expression of components. Sequences encoding a Cas9 molecule can comprise a nuclear localization signal (NLS), e.g., an SV40 NLS. In an embodiment, the sequence encoding a Cas9 molecule comprises at least two nuclear localization signals. In an embodiment, a promoter for a Cas9 molecule or a gRNA molecule can be, independently, inducible, tissue specific, or cell specific.

DNA-Based Delivery of an RNA-Guided Nuclease Molecule and One or More gRNA Molecules

[0874] Nucleic acids encoding RNA-guided nuclease molecules (e.g., Cas9 molecules, e.g., eaCas9 molecules), gRNA molecules, a donor template nucleic acid, or any combination (e.g., two or all) thereof can be administered to subjects or delivered into cells by art-known methods or as described herein. For example, Cas9-encoding and/or gRNA-encoding DNA, as well as donor template nucleic acids can be delivered by, e.g., vectors (e.g., viral or non-viral vectors), non-vector based methods (e.g., using naked DNA or DNA complexes), or a combination thereof.

[0875] Nucleic acids encoding Cas9 molecules (e.g., eaCas9 molecules) and/or gRNA molecules can be conjugated to molecules (e.g., N-acetylgalactosamine) promoting uptake by the target cells (e.g., hepatocytes). Donor template molecules can likewise be conjugated to molecules (e.g., N-acetylgalactosamine) promoting uptake by the target cells (e.g., hepatocytes).

[0876] In some embodiments, the Cas9- and/or gRNA-encoding DNA is delivered by a vector (e.g., viral vector/virus or plasmid).

[0877] Vectors can comprise a sequence that encodes a Cas9 molecule and/or a gRNA molecule and/or a donor template with high homology to the region (e.g., target sequence) being targeted. In certain embodiments, the donor template comprises all or part of a target sequence. Exemplary donor templates are a repair template, e.g., a gene correction template, or a gene mutation template, e.g., point mutation (e.g., single nucleotide (nt) substitution) template). A vector can also comprise a sequence encoding a signal peptide (e.g., for nuclear localization, nucleolar localization, or mitochondrial localization), fused, e.g., to a Cas9 molecule sequence. For example, the vectors can comprise a nuclear localization sequence (e.g., from SV40) fused to the sequence encoding the Cas9 molecule.

[0878] One or more regulatory/control elements, e.g., promoters, enhancers, introns, polyadenylation signals, Kozak consensus sequences, or internal ribosome entry sites (IRES), can be included in the vectors. In some embodiments, the promoter is recognized by RNA polymerase II (e.g., a CMV promoter). In other embodiments, the promoter is recognized by RNA polymerase III (e.g., a U6 promoter). In some embodiments, the promoter is a regulated promoter (e.g., inducible promoter). In other embodiments, the promoter is a constitutive promoter. In some embodiments, the promoter is a tissue specific promoter. In some embodiments, the promoter is a viral promoter. In other embodiments, the promoter is a non-viral promoter.

[0879] In some embodiments, the vector is a viral vector (e.g., for generation of recombinant viruses). In some embodiments, the virus is a DNA virus (e.g., dsDNA or ssDNA virus). In other embodiments, the virus is an RNA virus (e.g., an ssRNA virus). In some embodiments, the virus infects dividing cells. In other embodiments, the virus infects non-dividing cells. Exemplary viral vectors/viruses include, e.g., retroviruses, lentiviruses, adenovirus, adeno-associated virus (AAV), vaccinia viruses, poxviruses, and herpes simplex viruses.

[0880] In some embodiments, the virus infects both dividing and non-dividing cells. In some embodiments, the virus can integrate into the host genome. In some embodiments, the virus is engineered to have reduced immunity, e.g., in human. In some embodiments, the virus is replication-competent. In other embodiments, the virus is replication-defective, e.g., having one or more coding regions for the genes necessary for additional rounds of virion replication and/or packaging replaced with other genes or deleted. In some embodiments, the virus causes transient expression of the Cas9 molecule and/or the gRNA molecule. In other embodiments, the virus causes long-lasting, e.g., at least 1 week, 2 weeks, 1 month, 2 months, 3 months, 6 months, 9 months, 1 year, 2 years, or permanent expression, of the Cas9 molecule and/or the gRNA molecule. The packaging capacity of the viruses may vary, e.g., from at least about 4 kb to at least about 30 kb, e.g., at least about 5 kb, 10 kb, 15 kb, 20 kb, 25 kb, 30 kb, 35 kb, 40 kb, 45 kb, or 50 kb.

[0881] In an embodiment, the viral vector recognizes a specific cell type or tissue. For example, the viral vector can be pseudotyped with a different/alternative viral envelope glycoprotein; engineered with a cell type-specific receptor (e.g., genetic modification(s) of one or more viral envelope glycoproteins to incorporate a targeting ligand such as a peptide ligand, a single chain antibody, or a growth factor); and/or engineered to have a molecular bridge with dual specificities with one end recognizing a viral glycoprotein and the other end recognizing a moiety of the target cell surface (e.g., a ligand-receptor, monoclonal antibody, avidin-biotin and chemical conjugation).

[0882] In some embodiments, the RNA-guided nuclease (e.g., Cas9)- and/or gRNA-encoding nucleic acid sequence is delivered by a recombinant retrovirus. In some embodiments, the retrovirus (e.g., Moloney murine leukemia virus) comprises a reverse transcriptase, e.g., that allows integration into the host genome. In some embodiments, the retrovirus is replication-competent. In other embodiments, the retrovirus is replication-defective, e.g., having one of more coding regions for the genes necessary for additional rounds of virion replication and packaging replaced with other genes, or deleted.

[0883] In some embodiments, the RNA-guided nuclease (e.g., Cas9)- and/or gRNA-encoding nucleic acid sequence is delivered by a recombinant lentivirus. In an embodiment, the donor template nucleic acid is delivered by a recombinant retrovirus. For example, the lentivirus is replication-defective, e.g., does not comprise one or more genes required for viral replication.

[0884] In an embodiment, the RNA-guided nuclease (e.g., Cas9)- and/or gRNA-encoding nucleic acid sequence is delivered by a recombinant lentivirus. In an embodiment, the donor template nucleic acid is delivered by a recombinant lentivirus. For example, the lentivirus is replication-defective, e.g., does not comprise one or more genes required for viral replication.

[0885] In some embodiments, the RNA-guided nuclease (e.g., Cas9)- and/or gRNA-encoding nucleic acid sequence is delivered by a recombinant adenovirus. In an embodiment, the donor template nucleic acid is delivered by a recombinant adenovirus. In some embodiments, the adenovirus is engineered to have reduced immunity in human.

[0886] In some embodiments, the RNA-guided nuclease (e.g., Cas9)- and/or gRNA-encoding nucleic acid sequence is delivered by a recombinant AAV. In an embodiment, the donor template nucleic acid is delivered by a recombinant AAV. In some embodiments, the AAV does not incorporate its genome into that of a host cell, e.g., a target cell as describe herein. In some embodiments, the AAV can incorporate its genome into that of the host cell. In some embodiments, the AAV is a self-complementary adeno-associated virus (scAAV), e.g., a scAAV that packages both strands which anneal together to form double stranded DNA.

[0887] In an embodiment, an AAV capsid that can be used in the methods described herein is a capsid sequence from serotype AAV1, AAV2, AAV3, AAV4, AAV5, AAV6, AAV7, AAV8, AAV9, AAV.rh8, AAV.rh10, AAV.rh32/33, AAV.rh43, AAV.rh64R1, or AAV7m8.

[0888] In an embodiment, the RNA-guided nuclease (e.g., Cas9)- and/or gRNA-encoding DNA is delivered in a re-engineered AAV capsid, e.g., with 50% or greater, e.g., 60% or greater, 70% or greater, 80% or greater, 90% or greater, or 95% or greater, sequence homology with a capsid sequence from serotypes AAV1, AAV2, AAV3, AAV4, AAV5, AAV6, AAV7, AAV8, AAV9, AAV.rh8, AAV.rh10, AAV.rh32/33, AAV.rh43, or AAV.rh64R1.

[0889] In an embodiment, the RNA-guided nuclease (e.g., Cas9)- and/or gRNA-encoding DNA is delivered by a chimeric AAV capsid. In an embodiment, the donor template nucleic acid is delivered by a chimeric AAV capsid. Exemplary chimeric AAV capsids include, but are not limited to, AAV9i1, AAV2i8, AAV-DJ, AAV2G9, AAV2i8G9, or AAV8G9.

[0890] In an embodiment, the AAV is a self-complementary adeno-associated virus (scAAV), e.g., a scAAV that packages both strands which anneal together to form double stranded DNA.

[0891] In some embodiments, the RNA-guided nuclease (e.g., Cas9)- and/or gRNA-encoding DNA is delivered by a hybrid virus, e.g., a hybrid of one or more of the viruses described herein.

[0892] In an embodiment, the hybrid virus is hybrid of an AAV (e.g., of any AAV serotype), with a Bocavirus, B19 virus, porcine AAV, goose AAV, feline AAV, canine AAV, or MVM.

[0893] A packaging cell is used to form a virus particle that is capable of infecting a target cell. Exemplary packaging cells include 293 cells, which can package adenovirus, and ψ2 or PA317 cells, which can package retrovirus. A viral vector used in gene therapy is usually generated by a producer cell line that packages a nucleic acid vector into a viral particle. The vector typically contains the minimal viral sequences required for packaging and subsequent integration into a host or target cell (if applicable), with other viral sequences being replaced by an expression cassette encoding the protein to be expressed, e.g., Cas9. For example, an AAV vector used in gene therapy typically only possesses inverted terminal repeat (ITR) sequences from the AAV genome which are required for packaging and gene expression in the host or target cell. The missing viral functions can be supplied in trans by the packaging cell line and/or plasmid containing E2A, E4, and VA genes from adenovirus, and plasmid encoding Rep and Cap genes from AAV, as described in “Triple Transfection Protocol.” Henceforth, the viral DNA is packaged in a cell line, which contains a helper plasmid encoding the other AAV genes, namely rep and cap, but lacking ITR sequences. In certain embodiments, the viral DNA is packaged in a producer cell line, which contains E1A and/or E1B genes from adenovirus. The cell line is also infected with adenovirus as a helper. The helper virus (e.g., adenovirus or HSV) or helper plasmid promotes replication of the AAV vector and expression of AAV genes from the helper plasmid with ITRs. The helper plasmid is not packaged in significant amounts due to a lack of ITR sequences. Contamination with adenovirus can be reduced by, e.g., heat treatment to which adenovirus is more sensitive than AAV.

[0894] In an embodiment, the viral vector is capable of cell type and/or tissue type recognition. For example, the viral vector can be pseudotyped with a different/alternative viral envelope glycoprotein; engineered with a cell type-specific receptor (e.g., genetic modification of the viral envelope glycoproteins to incorporate targeting ligands such as a peptide ligand, a single chain antibody, a growth factor); and/or engineered to have a molecular bridge with dual specificities with one end recognizing a viral glycoprotein and the other end recognizing a moiety of the target cell surface (e.g., ligand-receptor, monoclonal antibody, avidin-biotin and chemical conjugation).

[0895] In an embodiment, the viral vector achieves cell type specific expression. For example, a tissue-specific promoter can be constructed to restrict expression of the transgene (Cas9 and gRNA) to only the target cell. The specificity of the vector can also be mediated by microRNA-dependent control of transgene expression. In an embodiment, the viral vector has increased efficiency of fusion of the viral vector and a target cell membrane. For example, a fusion protein such as fusion-competent hemagglutinin (HA) can be incorporated to increase viral uptake into cells. In an embodiment, the viral vector has the ability of nuclear localization. For example, a virus that requires the breakdown of the nuclear envelope (during cell division) and therefore will not infect a non-diving cell can be altered to incorporate a nuclear localization peptide in the matrix protein of the virus thereby enabling the transduction of non-proliferating cells.

[0896] In some embodiments, the RNA-guided nuclease (e.g., Cas9)- and/or gRNA-encoding DNA is delivered by a non-vector based method (e.g., using naked DNA or DNA complexes). For example, the DNA can be delivered, e.g., by organically modified silica or silicate (Ormosil), electroporation, transient cell compression or squeezing (see, e.g., Lee 2012), gene gun, sonoporation, magnetofection, lipid-mediated transfection, dendrimers, inorganic nanoparticles, calcium phosphates, or a combination thereof.

[0897] In an embodiment, delivery via electroporation comprises mixing the cells with the RNA-guided nuclease (e.g., Cas9)- and/or gRNA-encoding DNA in a cartridge, chamber or cuvette and applying one or more electrical impulses of defined duration and amplitude. In an embodiment, delivery via electroporation is performed using a system in which cells are mixed with the RNA-guided nuclease (e.g., Cas9)- and/or gRNA-encoding DNA in a vessel connected to a device (e.g., a pump) which feeds the mixture into a cartridge, chamber or cuvette wherein one or more electrical impulses of defined duration and amplitude are applied, after which the cells are delivered to a second vessel.

[0898] In some embodiments, the RNA-guided nuclease (e.g., Cas9)- and/or gRNA-encoding DNA is delivered by a combination of a vector and a non-vector based method. In an embodiment, the donor template nucleic acid is delivered by a combination of a vector and a non-vector based method. For example, virosomes combine liposomes with an inactivated virus (e.g., HIV or influenza virus), which can result in more efficient gene transfer, e.g., in respiratory epithelial cells than either viral or liposomal methods alone.

[0899] In certain embodiments, the delivery vehicle is a non-viral vector, and in certain of these embodiments the non-viral vector is an inorganic nanoparticle. Exemplary inorganic nanoparticles include, e.g., magnetic nanoparticles (e.g., Fe₃MnO₂) or silica. The outer surface of the nanoparticle can be conjugated with a positively charged polymer (e.g., polyethylenimine, polylysine, polyserine) which allows for attachment (e.g., conjugation or entrapment) of payload. In an embodiment, the non-viral vector is an organic nanoparticle (e.g., entrapment of the payload inside the nanoparticle). Exemplary organic nanoparticles include, e.g., SNALP liposomes that contain cationic lipids together with neutral helper lipids which are coated with polyethylene glycol (PEG) and protamine and nucleic acid complex coated with lipid coating.

[0900] Exemplary lipids for gene transfer are shown below in Table 1. Exemplary polymers for gene transfer are shown below in Table 5.

[0901] In an embodiment, the vehicle has targeting modifications to increase target cell update of nanoparticles and liposomes, e.g., cell specific antigens, monoclonal antibodies, single chain antibodies, aptamers, polymers, sugars (e.g., N-acetylgalactosamine (GalNAc)), and cell penetrating peptides. In an embodiment, the vehicle uses fusogenic and endosome-destabilizing peptides/polymers. In an embodiment, the vehicle undergoes acid-triggered conformational changes (e.g., to accelerate endosomal escape of the cargo). In an embodiment, a stimuli-cleavable polymer is used, e.g., for release in a cellular compartment. For example, disulfide-based cationic polymers that are cleaved in the reducing cellular environment can be used.

[0902] In an embodiment, the delivery vehicle is a biological non-viral delivery vehicle. In an embodiment, the vehicle is an attenuated bacterium (e.g., naturally or artificially engineered to be invasive but attenuated to prevent pathogenesis and expressing the transgene (e.g., Listeria monocytogenes, certain Salmonella strains, Biftdobacterium longum, and modified Escherichia coli), bacteria having nutritional and tissue-specific tropism to target specific tissues, bacteria having modified surface proteins to alter target tissue specificity). In an embodiment, the vehicle is a genetically modified bacteriophage (e.g., engineered phages having large packaging capacity, less immunogenic, containing mammalian plasmid maintenance sequences and having incorporated targeting ligands). In an embodiment, the vehicle is a mammalian virus-like particle. For example, modified viral particles can be generated (e.g., by purification of the “empty” particles followed by ex vivo assembly of the virus with the desired cargo). The vehicle can also be engineered to incorporate targeting ligands to alter target tissue specificity. In an embodiment, the vehicle is a biological liposome. For example, the biological liposome is a phospholipid-based particle derived from human cells (e.g., erythrocyte ghosts, which are red blood cells broken down into spherical structures derived from the subject (e.g., tissue targeting can be achieved by attachment of various tissue or cell-specific ligands), or secretory exosomes—subject (i.e., patient) derived membrane-bound nanovesicle (30-100 nm) of endocytic origin (e.g., can be produced from various cell types and can therefore be taken up by cells without the need for targeting ligands).

[0903] In an embodiment, one or more nucleic acid molecules (e.g., DNA molecules) other than the components of a CRISPR/RNA-guided nuclease system, e.g., the Cas9 molecule component and/or the gRNA molecule component described herein, are delivered. In an embodiment, the nucleic acid molecule is delivered at the same time as one or more of the components of the CRISPR/RNA-guided nuclease system are delivered. In an embodiment, the nucleic acid molecule is delivered before or after (e.g., less than about 30 minutes, 1 hour, 2 hours, 3 hours, 6 hours, 9 hours, 12 hours, 1 day, 2 days, 3 days, 1 week, 2 weeks, or 4 weeks) one or more of the components of the CRISPR/RNA-guided nuclease system are delivered. In an embodiment, the nucleic acid molecule is delivered by a different means than one or more of the components of the CRISPR/RNA-guided nuclease system, e.g., the Cas9 molecule component and/or the gRNA molecule component, are delivered. The nucleic acid molecule can be delivered by any of the delivery methods described herein. For example, the nucleic acid molecule can be delivered by a viral vector, e.g., an integration-deficient lentivirus, and the Cas9 molecule component and/or the gRNA molecule component can be delivered by electroporation, e.g., such that the toxicity caused by nucleic acids (e.g., DNAs) can be reduced. In an embodiment, the nucleic acid molecule encodes a therapeutic protein, e.g., a protein described herein. In an embodiment, the nucleic acid molecule encodes an RNA molecule, e.g., an RNA molecule described herein.

### Delivery of RNA Encoding an RNA-Guided Nuclease Molecule

[0904] RNA encoding RNA-guided nuclease (e.g., Cas9) and/or gRNA molecules can be delivered into cells, e.g., target cells described herein, by art-known methods or as described herein. For example, Cas9-encoding and/or gRNA-encoding RNA can be delivered, e.g., by microinjection, electroporation, transient cell compression or squeezing (see, e.g., Lee 2012), lipid-mediated transfection, peptide-mediated delivery, or a combination thereof. Cas9-encoding and/or gRNA-encoding RNA can be conjugated to molecules) promoting uptake by the target cells (e.g., target cells described herein).

[0905] In an embodiment, delivery via electroporation comprises mixing the cells with the RNA encoding Cas9 molecules and/or gRNA molecules, with or without donor template nucleic acid molecules, in a cartridge, chamber or cuvette and applying one or more electrical impulses of defined duration and amplitude. In an embodiment, delivery via electroporation is performed using a system in which cells are mixed with the RNA encoding Cas9 molecules and/or gRNA molecules, with or without donor template nucleic acid molecules in a vessel connected to a device (e.g., a pump) which feeds the mixture into a cartridge, chamber or cuvette wherein one or more electrical impulses of defined duration and amplitude are applied, after which the cells are delivered to a second vessel. Cas9-encoding and/or gRNA-encoding RNA can be conjugated to molecules to promote uptake by the target cells (e.g., target cells described herein).

### Delivery of RNA-Guided Nuclease Molecules

[0906] RNA-guided nuclease (e.g., Cas9) molecules can be delivered into cells by art-known methods or as described herein. For example, Cas9 protein molecules can be delivered, e.g., by microinjection, electroporation, transient cell compression or squeezing (see, e.g., Lee 2012), lipid-mediated transfection, peptide-mediated delivery, or a combination thereof. Delivery can be accompanied by DNA encoding a gRNA or by a gRNA. Cas9 protein can be conjugated to molecules promoting uptake by the target cells (e.g., target cells described herein).

[0907] In an embodiment, delivery via electroporation comprises mixing the cells with the Cas9 molecules and/or gRNA molecules, with or without donor nucleic acid, in a cartridge, chamber or cuvette and applying one or more electrical impulses of defined duration and amplitude. In an embodiment, delivery via electroporation is performed using a system in which cells are mixed with the Cas9 molecules and/or gRNA molecules, with or without donor nucleic acid in a vessel connected to a device (e.g., a pump) which feeds the mixture into a cartridge, chamber or cuvette wherein one or more electrical impulses of defined duration and amplitude are applied, after which the cells are delivered to a second vessel. Cas9-encoding and/or gRNA-encoding RNA can be conjugated to molecules to promote uptake by the target cells (e.g., target cells described herein).

### Route of Administration of CRISPR/RNA-Guided Nuclease System Components

[0908] Systemic modes of administration include oral and parenteral routes. Parenteral mutes include, by way of example, intravenous, intrarterial, intramuscular, intradermal, subcutaneous, intranasal, and intraperitoneal routes. Components administered systemically may be modified or formulated to target hepatocytes, liver oval cells, macrophages or monocytes.

[0909] Local modes of administration include, by way of example, intraparenchymal delivery to the liver, intrahepatic artery infusion and infusion into the portal vein. In an embodiment, significantly smaller amounts of the components (compared with systemic approaches) may exert an effect when administered locally (for example, directly into the liver parenchyma) compared to when administered systemically (for example, intravenously). Local modes of administration can reduce or eliminate the incidence of potentially toxic side effects that may occur when therapeutically effective amounts of a component are administered systemically.

[0910] Administration may be provided as a periodic bolus (for example, intravenously) or as continuous infusion from an internal reservoir or from an external reservoir (for example, from an intravenous bag or implantable pump). Components may be administered locally, for example, by continuous release from a sustained release drug delivery device implanted in the liver.

[0911] In addition, components may be formulated to permit release over a prolonged period of time. A release system can include a matrix of a biodegradable material or a material which releases the incorporated components by diffusion. The components can be homogeneously or heterogeneously distributed within the release system. A variety of release systems may be useful, with the choice of the appropriate system depending on the required rate of release for a particular application. Both non-degradable and degradable release systems can be used. Suitable release systems include polymers and polymeric matrices, non-polymeric matrices, or inorganic and organic excipients and diluents such as, but not limited to, calcium carbonate and sugar (for example, trehalose). Release systems may be natural or synthetic. However, synthetic release systems are preferred because generally they are more reliable, more reproducible and produce more defined release profiles. The release system material can be selected so that components having different molecular weights are released by diffusion through or degradation of the material.

[0912] Representative synthetic, biodegradable polymers include, for example: polyamides such as poly(amino acids) and poly(peptides); polyesters such as poly(lactic acid), poly(glycolic acid), poly(lactic-co-glycolic acid), and poly(caprolactone); poly(anhydrides); polyorthoesters; polycarbonates; and chemical derivatives thereof (substitutions, additions of chemical groups, for example, alkyl, alkylene, hydroxylations, oxidations, and other modifications routinely made by those skilled in the art), copolymers and mixtures thereof. Representative synthetic, non-degradable polymers include, for example: polyethers such as poly(ethylene oxide), poly(ethylene glycol), and poly(tetramethylene oxide); vinyl polymers-polyacrylates and polymethacrylates such as methyl, ethyl, other alkyl, hydroxyethyl methacrylate, acrylic and methacrylic acids, and others such as poly(vinyl alcohol), poly(vinyl pyrolidone), and poly(vinyl acetate); poly(urethanes); cellulose and its derivatives such as alkyl, hydroxyalkyl, ethers, esters, nitrocellulose, and various cellulose acetates; polysiloxanes; and any chemical derivatives thereof (substitutions, additions of chemical groups, for example, alkyl, alkylene, hydroxylations, oxidations, and other modifications routinely made by those skilled in the art), copolymers and mixtures thereof.

[0913] Poly(lactide-co-glycolide) microsphere can also be used. Typically the microspheres are composed of a polymer of lactic acid and glycolic acid, which are structured to form hollow spheres. The spheres can be approximately 15-30 microns in diameter and can be loaded with components described herein.

### Bi-Modal or Differential Delivery of CRISPR/RNA-Guided Nuclease System Components

[0914] Separate delivery of CRISPR/RNA-guided nuclease system components, e.g., the Cas9 molecule component and the gRNA molecule component, and more particularly, delivery of the components by differing modes, can enhance performance, e.g., by improving tissue specificity and safety.

[0915] In certain embodiments, the Cas9 molecule and the gRNA molecule are delivered by different modes, or as sometimes referred to herein as differential modes. Different or differential modes, as used herein, refer modes of delivery that confer different pharmacodynamic or pharmacokinetic properties on the subject component molecule, e.g., a Cas9 molecule, gRNA molecule, template nucleic acid, or payload. For example, the modes of delivery can result in different tissue distribution, different half-life, or different temporal distribution, e.g., in a selected compartment, tissue, or organ.

[0916] Some modes of delivery, e.g., delivery by a nucleic acid vector that persists in a cell, or in progeny of a cell, e.g., by autonomous replication or insertion into cellular nucleic acid, result in more persistent expression of and presence of a component. Examples include viral, e.g., adeno associated virus or lentivirus, delivery.

[0917] By way of example, the components, e.g., a Cas9 molecule and a gRNA molecule, can be delivered by modes that differ in terms of resulting half-life or persistent of the delivered component the body, or in a particular compartment, tissue or organ. In an embodiment, a gRNA molecule can be delivered by such modes. The Cas9 molecule component can be delivered by a mode which results in less persistence or less exposure to the body or a particular compartment or tissue or organ.

[0918] More generally, in an embodiment, a first mode of delivery is used to deliver a first component and a second mode of delivery is used to deliver a second component. The first mode of delivery confers a first pharmacodynamic or pharmacokinetic property. The first pharmacodynamic property can be, e.g., distribution, persistence, or exposure, of the component, or of a nucleic acid that encodes the component, in the body, a compartment, tissue or organ. The second mode of delivery confers a second pharmacodynamic or pharmacokinetic property. The second pharmacodynamic property can be, e.g., distribution, persistence, or exposure, of the component, or of a nucleic acid that encodes the component, in the body, a compartment, tissue or organ.

[0919] In certain embodiments, the first pharmacodynamic or pharmacokinetic property, e.g., distribution, persistence or exposure, is more limited than the second pharmacodynamic or pharmacokinetic property.

[0920] In certain embodiments, the first mode of delivery is selected to optimize, e.g., minimize, a pharmacodynamic or pharmacokinetic property, e.g., distribution, persistence or exposure.

[0921] In certain embodiments, the second mode of delivery is selected to optimize, e.g., maximize, a pharmacodynamic or pharmacokinetic property, e.g., distribution, persistence or exposure.

[0922] In certain embodiments, the first mode of delivery comprises the use of a relatively persistent element, e.g., a nucleic acid, e.g., a plasmid or viral vector, e.g., an AAV or lentivirus. As such vectors are relatively persistent product transcribed from them would be relatively persistent.

[0923] In certain embodiments, the second mode of delivery comprises a relatively transient element, e.g., an RNA or protein.

[0924] In certain embodiments, the first component comprises gRNA, and the delivery mode is relatively persistent, e.g., the gRNA is transcribed from a plasmid or viral vector, e.g., an AAV or lentivirus. Transcription of these genes would be of little physiological consequence because the genes do not encode for a protein product, and the gRNAs are incapable of acting in isolation. The second component, a Cas9 molecule, is delivered in a transient manner, for example as mRNA or as protein, ensuring that the full Cas9 molecule/gRNA molecule complex is only present and active for a short period of time.

[0925] In certain embodiments, the components, e.g., an RNA-guided nuclease (e.g., a Cas9 molecule), a gRNA molecule, and a template nucleic acid (e.g., ssODN), may be delivered through, without limitation, (1) viral delivery of RNA-guided nuclease (e.g., Cas9 molecule) coding sequences, viral delivery of gRNA sequence, and non-viral delivery of ssODN, (2) viral delivery of RNA-guided nuclease (e.g., Cas9 molecule) coding sequences, non-viral delivery of gRNA sequence, and non-viral delivery of ssODN, (3) non-viral delivery of RNA-guided nuclease (e.g., Cas9 molecule) DNA or mRNA, viral delivery of gRNA sequence, non-viral delivery of ssODN, or (4) non-viral delivery of RNA-guided nuclease (e.g., Cas9 molecule)-gRNA RNP complexes and non-viral delivery of ssODN.

[0926] Furthermore, the components can be delivered in different molecular form or with different delivery vectors that complement one another to enhance safety and tissue specificity.

[0927] Use of differential delivery modes can enhance performance, safety, and/or efficacy, e.g., the likelihood of an eventual off-target modification can be reduced. Delivery of immunogenic components, e.g., Cas9 molecules, by less persistent modes can reduce immunogenicity, as peptides from the bacterially-derived Cas enzyme are displayed on the surface of the cell by MHC molecules. A two-part delivery system can alleviate these drawbacks.

[0928] Differential delivery modes can be used to deliver components to different, but overlapping target regions. The formation active complex is minimized outside the overlap of the target regions. Thus, in an embodiment, a first component, e.g., a gRNA molecule is delivered by a first delivery mode that results in a first spatial, e.g., tissue, distribution. A second component, e.g., a Cas9 molecule is delivered by a second delivery mode that results in a second spatial, e.g., tissue, distribution. In an embodiment the first mode comprises a first element selected from a liposome, nanoparticle, e.g., polymeric nanoparticle, and a nucleic acid, e.g., viral vector. The second mode comprises a second element selected from the group. In an embodiment, the first mode of delivery comprises a first targeting element, e.g., a cell specific receptor or an antibody, and the second mode of delivery does not include that element. In certain embodiments, the second mode of delivery comprises a second targeting element, e.g., a second cell specific receptor or second antibody.

[0929] When the Cas9 molecule is delivered in a virus delivery vector, a liposome, or polymeric nanoparticle, there is the potential for delivery to and therapeutic activity in multiple tissues, when it may be desirable to only target a single tissue. A two-part delivery system can resolve this challenge and enhance tissue specificity. If the gRNA molecule and the Cas9 molecule are packaged in separated delivery vehicles with distinct but overlapping tissue tropism, the fully functional complex is only be formed in the tissue that is targeted by both vectors.

### Ex Vivo Delivery of CRISPR/RNA-Guided Nuclease System Components

[0930] In certain embodiments, CRISPR/RNA-guided nuclease (e.g., Cas9) system components described in Table 3 are introduced into cells which are then introduced into the subject. Methods of introducing the components can include, e.g., any of the delivery methods described in Table 4.

### Modified Nucleosides, Nucleotides, and Nucleic Acids

[0931] Modified nucleosides and modified nucleotides can be present in nucleic acids, e.g., particularly gRNA, but also other forms of RNA, e.g., mRNA, RNAi, or siRNA. As described herein, “nucleoside” is defined as a compound containing a five-carbon sugar molecule (a pentose or ribose) or derivative thereof, and an organic base, purine or pyrimidine, or a derivative thereof. As described herein, “nucleotide” is defined as a nucleoside further comprising a phosphate group.

[0932] Modified nucleosides and nucleotides can include one or more of:
[0933] (i) alteration, e.g., replacement, of one or both of the non-linking phosphate oxygens and/or of one or more of the linking phosphate oxygens in the phosphodiester backbone linkage;
[0934] (ii) alteration, e.g., replacement, of a constituent of the ribose sugar, e.g., of the 2′ hydroxyl on the ribose sugar;
[0935] (iii) wholesale replacement of the phosphate moiety with “dephospho” linkers;
[0936] (iv) modification or replacement of a naturally occurring nucleobase;
[0937] (v) replacement or modification of the ribose-phosphate backbone;
[0938] (vi) modification of the 3′ end or 5′ end of the oligonucleotide, e.g., removal, modification or replacement of a terminal phosphate group or conjugation of a moiety; and
[0939] (vii) modification of the sugar.

[0940] The modifications listed above can be combined to provide modified nucleosides and nucleotides that can have two, three, four, or more modifications. For example, a modified nucleoside or nucleotide can have a modified sugar and a modified nucleobase. In an embodiment, every base of a gRNA is modified, e.g., all bases have a modified phosphate group, e.g., all are phosphorothioate groups. In an embodiment, all, or substantially all, of the phosphate groups of a unimolecular or modular gRNA molecule are replaced with phosphorothioate groups.

[0941] In an embodiment, modified nucleotides, e.g., nucleotides having modifications as described herein, can be incorporated into a nucleic acid, e.g., a “modified nucleic acid.” In an embodiment, the modified nucleic acids comprise one, two, three or more modified nucleotides. In an embodiment, at least 5% (e.g., at least about 5%, at least about 10%, at least about 15%, at least about 20%, at least about 25%, at least about 30%, at least about 35%, at least about 40%, at least about 45%, at least about 50%, at least about 55%, at least about 60%, at least about 65%, at least about 70%, at least about 75%, at least about 80%, at least about 85%, at least about 90%, at least about 95%, or about 100%) of the positions in a modified nucleic acid are a modified nucleotides.

[0942] Unmodified nucleic acids can be prone to degradation by, e.g., cellular nucleases. For example, nucleases can hydrolyze nucleic acid phosphodiester bonds. Accordingly, in one aspect the modified nucleic acids described herein can contain one or more modified nucleosides or nucleotides, e.g., to introduce stability toward nucleases.

[0943] In an embodiment, the modified nucleosides, modified nucleotides, and modified nucleic acids described herein can exhibit a reduced innate immune response when introduced into a population of cells, both in vivo and ex vivo. The term “innate immune response” includes a cellular response to exogenous nucleic acids, including single stranded nucleic acids, generally of viral or bacterial origin, which involves the induction of cytokine expression and release, particularly the interferons, and cell death. In an embodiment, the modified nucleosides, modified nucleotides, and modified nucleic acids described herein can disrupt binding of a major groove interacting partner with the nucleic acid. In an embodiment, the modified nucleosides, modified nucleotides, and modified nucleic acids described herein can exhibit a reduced innate immune response when introduced into a population of cells, both in vivo and ex vivo, and also disrupt binding of a major groove interacting partner with the nucleic acid.

### Definitions of Chemical Groups

[0944] As used herein, “alkyl” is meant to refer to a saturated hydrocarbon group which is straight-chained or branched. Example alkyl groups include methyl (Me), ethyl (Et), propyl (e.g., n-propyl and isopropyl), butyl (e.g., n-butyl, isobutyl, t-butyl), pentyl (e.g., n-pentyl, isopentyl, neopentyl), and the like. An alkyl group can contain from 1 to about 20, from 2 to about 20, from 1 to about 12, from 1 to about 8, from 1 to about 6, from 1 to about 4, or from 1 to about 3 carbon atoms.

[0945] As used herein, “aryl” refers to monocyclic or polycyclic (e.g., having 2, 3 or 4 fused rings) aromatic hydrocarbons such as, for example, phenyl, naphthyl, anthracenyl, phenanthrenyl, indanyl, indenyl, and the like. In an embodiment, aryl groups have from 6 to about 20 carbon atoms.

[0946] As used herein, “alkenyl” refers to an aliphatic group containing at least one double bond.

[0947] As used herein, “alkynyl” refers to a straight or branched hydrocarbon chain containing 2-12 carbon atoms and characterized in having one or more triple bonds. Examples of alkynyl groups include, but are not limited to, ethynyl, propargyl, and 3-hexynyl.

[0948] As used herein, “arylalkyl” or “aralkyl” refers to an alkyl moiety in which an alkyl hydrogen atom is replaced by an aryl group. Aralkyl includes groups in which more than one hydrogen atom has been replaced by an aryl group. Examples of “arylalkyl” or “aralkyl” include benzyl, 2-phenylethyl, 3-phenylpropyl, 9-fluorenyl, benzhydryl, and trityl groups.

[0949] As used herein, “cycloalkyl” refers to a cyclic, bicyclic, tricyclic, or polycyclic non-aromatic hydrocarbon groups having 3 to 12 carbons. Examples of cycloalkyl moieties include, but are not limited to, cyclopropyl, cyclopentyl, and cyclohexyl.

[0950] As used herein, “heterocyclyl” refers to a monovalent radical of a heterocyclic ring system. Representative heterocyclyls include, without limitation, tetrahydrofuranyl, tetrahydrothienyl, pyrrolidinyl, pyrrolidonyl, piperidinyl, pyrrolinyl, piperazinyl, dioxanyl, dioxolanyl, diazepinyl, oxazepinyl, thiazepinyl, and morpholinyl.

[0951] As used herein, “heteroaryl” refers to a monovalent radical of a heteroaromatic ring system. Examples of heteroaryl moieties include, but are not limited to, imidazolyl, oxazolyl, thiazolyl, triazolyl, pyrrolyl, furanyl, indolyl, thiophenyl pyrazolyl, pyridinyl, pyrazinyl, pyridazinyl, pyrimidinyl, indolizinyl, purinyl, naphthyridinyl, quinolyl, and pteridinyl.

### Phosphate Backbone Modifications

### Phosphate Group

[0952] In an embodiment, the phosphate group of a modified nucleotide can be modified by replacing one or more of the oxygens with a different substituent. Further, the modified nucleotide, e.g., modified nucleotide present in a modified nucleic acid, can include the wholesale replacement of an unmodified phosphate moiety with a modified phosphate as described herein. In an embodiment, the modification of the phosphate backbone can include alterations that result in either an uncharged linker or a charged linker with unsymmetrical charge distribution.

[0953] Examples of modified phosphate groups include, phosphorothioate, phosphoroselenates, borano phosphates, borano phosphate esters, hydrogen phosphonates, phosphoroamidates, alkyl or aryl phosphonates and phosphotriesters. In an embodiment, one of the non-bridging phosphate oxygen atoms in the phosphate backbone moiety can be replaced by any of the following groups: sulfur (S), selenium (Se), BR₃ (wherein R can be, e.g., hydrogen, alkyl, or aryl), C (e.g., an alkyl group, an aryl group, and the like), H, NR₂ (wherein R can be, e.g., hydrogen, alkyl, or aryl), or OR (wherein R can be, e.g., alkyl or aryl). The phosphorous atom in an unmodified phosphate group is achiral. However, replacement of one of the non-bridging oxygens with one of the above atoms or groups of atoms can render the phosphorous atom chiral; that is to say that a phosphorous atom in a phosphate group modified in this way is a stereogenic center. The stereogenic phosphorous atom can possess either the “R” configuration (herein Rp) or the “S” configuration (herein Sp).

[0954] Phosphorodithioates have both non-bridging oxygens replaced by sulfur. The phosphorus center in the phosphorodithioates is achiral which precludes the formation of oligoribonucleotide diastereomers. In an embodiment, modifications to one or both non-bridging oxygens can also include the replacement of the non-bridging oxygens with a group independently selected from S, Se, B, C, H, N, and OR (R can be, e.g., alkyl or aryl).

[0955] The phosphate linker can also be modified by replacement of a bridging oxygen, (i.e., the oxygen that links the phosphate to the nucleoside), with nitrogen (bridged phosphoroamidates), sulfur (bridged phosphorothioates) and carbon (bridged methylenephosphonates). The replacement can occur at either linking oxygen or at both of the linking oxygens.

### Replacement of the Phosphate Group

[0956] The phosphate group can be replaced by non-phosphorus containing connectors. In an embodiment, the charge phosphate group can be replaced by a neutral moiety.

[0957] Examples of moieties which can replace the phosphate group can include, without limitation, e.g., methyl phosphonate, hydroxylamino, siloxane, carbonate, carboxymethyl, carbamate, amide, thioether, ethylene oxide linker, sulfonate, sulfonamide, thioformacetal, formacetal, oxime, methyleneimino, methylenemethylimino, methylenehydrazo, methylenedimethylhydrazo and methyleneoxymethylimino.

### Replacement of the Ribophosphate Backbone

[0958] Scaffolds that can mimic nucleic acids can also be constructed wherein the phosphate linker and ribose sugar are replaced by nuclease resistant nucleoside or nucleotide surrogates. In an embodiment, the nucleobases can be tethered by a surrogate backbone. Examples can include, without limitation, the morpholino, cyclobutyl, pyrrolidine and peptide nucleic acid (PNA) nucleoside surrogates.

### Sugar Modifications

[0959] The modified nucleosides and modified nucleotides can include one or more modifications to the sugar group. For example, the 2′ hydroxyl group (OH) can be modified or replaced with a number of different “oxy” or “deoxy” substituents. In an embodiment, modifications to the 2′ hydroxyl group can enhance the stability of the nucleic acid since the hydroxyl can no longer be deprotonated to form a 2′-alkoxide ion. The 2′-alkoxide can catalyze degradation by intramolecular nucleophilic attack on the linker phosphorus atom.

[0960] Examples of “oxy”-2′ hydroxyl group modifications can include alkoxy or aryloxy (OR, wherein “R” can be, e.g., alkyl, cycloalkyl, aryl, aralkyl, heteroaryl or a sugar); polyethyleneglycols (PEG), O(CH₂CH₂O)ₙCH₂CH₂OR wherein R can be, e.g., H or optionally substituted alkyl, and n can be an integer from 0 to 20 (e.g., from 0 to 4, from 0 to 8, from 0 to 10, from 0 to 16, from 1 to 4, from 1 to 8, from 1 to 10, from 1 to 16, from 1 to 20, from 2 to 4, from 2 to 8, from 2 to 10, from 2 to 16, from 2 to 20, from 4 to 8, from 4 to 10, from 4 to 16, and from 4 to 20). In an embodiment, the “oxy”-2′ hydroxyl group modification can include “locked” nucleic acids (LNA) in which the 2′ hydroxyl can be connected, e.g., by a C₁₋₆ alkylene or C₁₋₆ heteroalkylene bridge, to the 4′ carbon of the same ribose sugar, where exemplary bridges can include methylene, propylene, ether, or amino bridges; O-amino (wherein amino can be, e.g., NH₂; alkylamino, dialkylamino, heterocyclyl, arylamino, diarylamino, heteroarylamino, or diheteroarylamino, ethylenediamine, or polyamino) and aminoalkoxy, O(CH₂)ₙ-amino, (wherein amino can be, e.g., NH₂; alkylamino, dialkylamino, heterocyclyl, arylamino, diarylamino, heteroarylamino, or diheteroarylamino, ethylenediamine, or polyamino). In an embodiment, the “oxy”-2′ hydroxyl group modification can include the methoxyethyl group (MOE), (OCH₂CH₂OCH₃, e.g., a PEG derivative).

[0961] “Deoxy” modifications can include hydrogen (i.e., deoxyribose sugars, e.g., at the overhang portions of partially ds RNA); halo (e.g., bromo, chloro, fluoro, or iodo); amino (wherein amino can be, e.g., NH₂; alkylamino, dialkylamino, heterocyclyl, arylamino, diarylamino, heteroarylamino, diheteroarylamino, or amino acid); NH(CH₂CH₂NH)ₙCH₂CH₂-amino (wherein amino can be, e.g., as described herein), —NHC(O)R (wherein R can be, e.g., alkyl, cycloalkyl, aryl, aralkyl, heteroaryl or sugar), cyano; mercapto; alkyl-thio-alkyl; thioalkoxy; and alkyl, cycloalkyl, aryl, alkenyl and alkynyl, which may be optionally substituted with e.g., an amino as described herein.

[0962] The sugar group can also contain one or more carbons that possess the opposite stereochemical configuration than that of the corresponding carbon in ribose. Thus, a modified nucleic acid can include nucleotides containing e.g., arabinose, as the sugar. The nucleotide “monomer” can have an alpha linkage at the 1′ position on the sugar, e.g., alpha-nucleosides. The modified nucleic acids can also include “abasic” sugars, which lack a nucleobase at C-1′. These abasic sugars can also be further modified at one or more of the constituent sugar atoms. The modified nucleic acids can also include one or more sugars that are in the L form, e.g., L-nucleosides.

[0963] Generally, RNA includes the sugar group ribose, which is a 5-membered ring having an oxygen. Exemplary modified nucleosides and modified nucleotides can include, without limitation, replacement of the oxygen in ribose (e.g., with sulfur (S), selenium (Se), or alkylene, such as, e.g., methylene or ethylene); addition of a double bond (e.g., to replace ribose with cyclopentenyl or cyclohexenyl); ring contraction of ribose (e.g., to form a 4-membered ring of cyclobutane or oxetane); ring expansion of ribose (e.g., to form a 6- or 7-membered ring having an additional carbon or heteroatom, such as for example, anhydrohexitol, altritol, mannitol, cyclohexanyl, cyclohexenyl, and morpholino that also has a phosphoramidate backbone). In an embodiment, the modified nucleotides can include multicyclic forms (e.g., tricyclo; and “unlocked” forms, such as glycol nucleic acid (GNA) (e.g., R-GNA or S-GNA, where ribose is replaced by glycol units attached to phosphodiester bonds), threose nucleic acid (TNA, where ribose is replaced with a-L-threofuranosyl-(3′→2′)).

### Modifications on the Nucleobase

[0964] The modified nucleosides and modified nucleotides described herein, which can be incorporated into a modified nucleic acid, can include a modified nucleobase. Examples of nucleobases include, but are not limited to, adenine (A), guanine (G), cytosine (C), and uracil (U). These nucleobases can be modified or wholly replaced to provide modified nucleosides and modified nucleotides that can be incorporated into modified nucleic acids. The nucleobase of the nucleotide can be independently selected from a purine, a pyrimidine, a purine or pyrimidine analog. In an embodiment, the nucleobase can include, for example, naturally-occurring and synthetic derivatives of a base.

### Uracil

[0965] In an embodiment, the modified nucleobase is a modified uracil. Exemplary nucleobases and nucleosides having a modified uracil include without limitation pseudouridine (ψ), pyridin-4-one ribonucleoside, 5-aza-uridine, 6-aza-uridine, 2-thio-5-aza-uridine, 2-thio-uridine (s2U), 4-thio-uridine (s4U), 4-thio-pseudouridine, 2-thio-pseudouridine, 5-hydroxy-uridine (ho⁵U), 5-aminoallyl-uridine, 5-halo-uridine (e.g., 5-iodo-uridine or 5-bromo-uridine), 3-methyl-uridine (m³U), 5-methoxy-uridine (mo⁵U), uridine 5-oxyacetic acid (cmo⁵U), uridine 5-oxyacetic acid methyl ester (mcmo⁵U), 5-carboxymethyl-uridine (cm⁵U), 1-carboxymethyl-pseudouridine, 5-carboxyhydroxymethyl-uridine (chm⁵U), 5-carboxyhydroxymethyl-uridine methyl ester (mchm⁵U), 5-methoxycarbonylmethyl-uridine (mcm⁵U), 5-methoxycarbonylmethyl-2-thio-uridine (mcm⁵s2U), 5-aminomethyl-2-thio-uridine (nm⁵s2U), 5-methylaminomethyl-uridine (mnm⁵U), 5-methylaminomethyl-2-thio-uridine (mnm⁵s2U), 5-methylaminomethyl-2-seleno-uridine (mnm⁵se²U), 5-carbamoylmethyl-uridine (ncm⁵U), 5-carboxymethylaminomethyl-uridine (cmnm⁵U), 5-carboxymethylaminomethyl-2-thio-uridine (cmnm⁵s2U), 5-propynyl-uridine, 1-propynyl-pseudouridine, 5-taurinomethyl-uridine (τcm⁵U), 1-taurinomethyl-pseudouridine, 5-taurinomethyl-2-thio-uridine (τm⁵s2U), 1-taurinomethyl-4-thio-pseudouridine, 5-methyl-uridine (m⁵U, i.e., having the nucleobase deoxythymine), 1-methyl-pseudouridine (m¹ψ), 5-methyl-2-thio-uridine (m⁵s2U), 1-methyl-4-thio-pseudouridine (m¹s⁴ψ), 4-thio-1-methyl-pseudouridine, 3-methyl-pseudouridine (m³ψ), 2-thio-1-methyl-pseudouridine, 1-methyl-1-deaza-pseudouridine, 2-thio-1-methyl-1-deaza-pseudouridine, dihydrouridine (D), dihydropseudouridine, 5,6-dihydrouridine, 5-methyl-dihydrouridine (m⁵D), 2-thio-dihydrouridine, 2-thio-dihydropseudouridine, 2-methoxy-uridine, 2-methoxy-4-thio-uridine, 4-methoxy-pseudouridine, 4-methoxy-2-thio-pseudouridine, N1-methyl-pseudouridine, 3-(3-amino-3-carboxypropyl)uridine (acp³U), 1-methyl-3-(3-amino-3-carboxypropyl)pseudouridine (acp³ψ), 5-(isopentenylaminomethyl)uridine (inm⁵U), 5-(isopentenylaminomethyl)-2-thio-uridine (inm⁵s2U), α-thio-uridine, 2′-O-methyl-uridine (Um), 5,2′-O-dimethyl-uridine (m⁵Um), 2′-O-methyl-pseudouridine (ψm), 2-thio-2′-O-methyl-uridine (s2Um), 5-methoxycarbonylmethyl-2′-O-methyl-uridine (mcm⁵Um), 5-carbamoylmethyl-2′-O-methyl-uridine (ncm⁵Um), 5-carboxymethylaminomethyl-2′-O-methyl-uridine (cmnm⁵Um), 3,2′-O-dimethyl-uridine (m³Um), 5-(isopentenylaminomethyl)-2′-O-methyl-uridine (inm⁵Um), 1-thio-uridine, deoxythymidine, 2′-F-ara-uridine, 2′-F-uridine, 2′-OH-ara-uridine, 5-(2-carbomethoxyvinyl) uridine, 5-[3-(1-E-propenylamino)uridine, pyrazolo[3,4-d]pyrimidines, xanthine, and hypoxanthine.

### Cytosine

[0966] In an embodiment, the modified nucleobase is a modified cytosine. Exemplary nucleobases and nucleosides having a modified cytosine include without limitation 5-aza-cytidine, 6-aza-cytidine, pseudoisocytidine, 3-methyl-cytidine (m³C), N4-acetyl-cytidine (act), 5-formyl-cytidine (f⁵C), N4-methyl-cytidine (m⁴C), 5-methyl-cytidine (m⁵C), 5-halo-cytidine (e.g., 5-iodo-cytidine), 5-hydroxymethyl-cytidine (hm⁵C), 1-methyl-pseudoisocytidine, pyrrolo-cytidine, pyrrolo-pseudoisocytidine, 2-thio-cytidine (s2C), 2-thio-5-methyl-cytidine, 4-thio-pseudoisocytidine, 4-thio-1-methyl-pseudoisocytidine, 4-thio-1-methyl-1-deaza-pseudoisocytidine, 1-methyl-1-deaza-pseudoisocytidine, zebularine, 5-aza-zebularine, 5-methyl-zebularine, 5-aza-2-thio-zebularine, 2-thio-zebularine, 2-methoxy-cytidine, 2-methoxy-5-methyl-cytidine, 4-methoxy-pseudoisocytidine, 4-methoxy-1-methyl-pseudoisocytidine, lysidine (k²C), α-thio-cytidine, 2′-O-methyl-cytidine (Cm), 5,2′-O-dimethyl-cytidine (m⁵Cm), N4-acetyl-2′-O-methyl-cytidine (ac⁴Cm), N4,2′-O-dimethyl-cytidine (m⁴Cm), 5-formyl-2′-O-methyl-cytidine (f⁵Cm), N4,N4,2′-O-trimethyl-cytidine (m⁴₂Cm), 1-thio-cytidine, 2′-F-ara-cytidine, 2′-F-cytidine, and 2′-OH-ara-cytidine.

### Adenine

[0967] In an embodiment, the modified nucleobase is a modified adenine. Exemplary nucleobases and nucleosides having a modified adenine include without limitation 2-amino-purine, 2,6-diaminopurine, 2-amino-6-halo-purine (e.g., 2-amino-6-chloro-purine), 6-halo-purine (e.g., 6-chloro-purine), 2-amino-6-methyl-purine, 8-azido-adenosine, 7-deaza-adenosine, 7-deaza-8-aza-adenosine, 7-deaza-2-amino-purine, 7-deaza-8-aza-2-amino-purine, 7-deaza-2,6-diaminopurine, 7-deaza-8-aza-2,6-diaminopurine, 1-methyl-adenosine (m¹A), 2-methyl-adenosine (m²A), N6-methyl-adenosine (m⁶A), 2-methylthio-N6-methyl-adenosine (ms2m⁶A), N6-isopentenyl-adenosine (i⁶A), 2-methylthio-N6-isopentenyl-adenosine (ms²i⁶A), N6-(cis-hydroxyisopentenyl)adenosine (io⁶A), 2-methylthio-N6-(cis-hydroxyisopentenyl)adenosine (ms2io⁶A), N6-glycinylcarbamoyl-adenosine (g⁶A), N6-threonylcarbamoyl-adenosine (t⁶A), N6-methyl-N6-threonylcarbamoyl-adenosine (m⁶t⁶A), 2-methylthio-N6-threonylcarbamoyl-adenosine (ms²g⁶A), N6,N6-dimethyl-adenosine (m⁶2A), N6-hydroxynorvalylcarbamoyl-adenosine (hn⁶A), 2-methylthio-N6-hydroxynorvalylcarbamoyl-adenosine (ms2hn⁶A), N6-acetyl-adenosine (ac⁶A), 7-methyl-adenosine, 2-methylthio-adenosine, 2-methoxy-adenosine, α-thio-adenosine, 2′-O-methyl-adenosine (Am), N⁶,2′-O-dimethyl-adenosine (m⁶Am), N⁶-Methyl-2′-deoxyadenosine, N6,N6,2′-O-trimethyl-adenosine (m⁶₂Am), 1,2′-O-dimethyl-adenosine (m¹Am), 2′-O-ribosyladenosine (phosphate) (Ar(p)), 2-amino-N6-methyl-purine, 1-thio-adenosine, 8-azido-adenosine, 2′-F-ara-adenosine, 2′-F-adenosine, 2′-OH-ara-adenosine, and N6-(19-amino-pentaoxanonadecyl)-adenosine.

### Guanine

[0968] In an embodiment, the modified nucleobase is a modified guanine. Exemplary nucleobases and nucleosides having a modified guanine include without limitation inosine (I), 1-methyl-inosine (m¹I), wyosine (imG), methylwyosine (mimG), 4-demethyl-wyosine (imG-14), isowyosine (imG2), wybutosine (yW), peroxywybutosine (_{O}_{₂}yW), hydroxywybutosine (OHyW), undermodified hydroxywybutosine (OHyW*), 7-deaza-guanosine, queuosine (Q), epoxyqueuosine (oQ), galactosyl-queuosine (galQ), mannosyl-queuosine (manQ), 7-cyano-7-deaza-guanosine (preQ₀), 7-aminomethyl-7-deaza-guanosine (preQ₁), archaeosine (G⁺), 7-deaza-8-aza-guanosine, 6-thio-guanosine, 6-thio-7-deaza-guanosine, 6-thio-7-deaza-8-aza-guanosine, 7-methyl-guanosine (m⁷G), 6-thio-7-methyl-guanosine, 7-methyl-inosine, 6-methoxy-guanosine, 1-methyl-guanosine (m′G), N2-methyl-guanosine (m²G), N2,N2-dimethyl-guanosine (m²₂G), N2,7-dimethyl-guanosine (m²,7G), N2, N2,7-dimethyl-guanosine (m²,2,7G), 8-oxo-guanosine, 7-methyl-8-oxo-guanosine, 1-methyl-6-thio-guanosine, N2-methyl-6-thio-guanosine, N2,N2-dimethyl-6-thio-guanosine, α-thio-guanosine, 2′-O-methyl-guanosine (Gm), N2-methyl-2′-O-methyl-guanosine (m²Gm), N2,N2-dimethyl-2′-O-methyl-guanosine (m22Gm), 1-methyl-2′-O-methyl-guanosine (m′Gm), N2,7-dimethyl-2′-O-methyl-guanosine (m²,7Gm), 2′-O-methyl-inosine (Im), 1,2′-O-dimethyl-inosine (m′Im), O⁶-phenyl-2′-deoxyinosine, 2′-O-ribosylguanosine (phosphate) (Gr(p)), 1-thio-guanosine, O⁶-methyl-guanosine, O⁶-Methyl-2′-deoxyguanosine, 2′-F-ara-guanosine, and 2′-F-guanosine.

Exemplary Modified gRNAs

[0969] In some embodiments, the modified nucleic acids can be modified gRNAs. It is to be understood that any of the gRNAs described herein can be modified in accordance with this section, including any gRNA that comprises a targeting domain from SEQ ID NOs:253-2190.

[0970] As discussed above, transiently expressed or delivered nucleic acids can be prone to degradation by, e.g., cellular nucleases. Accordingly, in one aspect the modified gRNAs described herein can contain one or more modified nucleosides or nucleotides which introduce stability toward nucleases. While not wishing to be bound by theory it is also believed that certain modified gRNAs described herein can exhibit a reduced innate immune response when introduced into a population of cells, particularly the cells of the present invention. As noted above, the term “innate immune response” includes a cellular response to exogenous nucleic acids, including single stranded nucleic acids, generally of viral or bacterial origin, which involves the induction of cytokine expression and release, particularly the interferons, and cell death.

[0971] While some of the exemplary modification discussed in this section may be included at any position within the gRNA sequence, in some embodiments, a gRNA comprises a modification at or near its 5′ end (e.g., within 1-10, 1-5, or 1-2 nucleotides of its 5′ end). In some embodiments, a gRNA comprises a modification at or near its 3′ end (e.g., within 1-10, 1-5, or 1-2 nucleotides of its 3′ end). In some embodiments, a gRNA comprises both a modification at or near its 5′ end and a modification at or near its 3′ end.

[0972] In an embodiment, the 5′ end of a gRNA is modified by the inclusion of a eukaryotic mRNA cap structure or cap analog (e.g., a G(S′)ppp(5′)G cap analog, a m7G(5′)ppp(5′)G cap analog, or a 3′-O-Me-m7G(5′)ppp(5′)G anti reverse cap analog (ARCA)). The cap or cap analog can be included during either chemical synthesis or in vitro transcription of the gRNA.

[0973] In an embodiment, an in vitro transcribed gRNA is modified by treatment with a phosphatase (e.g., calf intestinal alkaline phosphatase) to remove the 5′ triphosphate group.

[0974] In an embodiment, the 3′ end of a gRNA is modified by the addition of one or more (e.g., 25-200) adenine (A) residues. The polyA tract can be contained in the nucleic acid (e.g., plasmid, PCR product, viral genome) encoding the gRNA, or can be added to the gRNA during chemical synthesis, or following in vitro transcription using a polyadenosine polymerase (e.g., E. coli Poly(A)Polymerase).

[0975] In an embodiment, in vitro transcribed gRNA contains both a 5′ cap structure or cap analog and a 3′ polyA tract. In an embodiment, an in vitro transcribed gRNA is modified by treatment with a phosphatase (e.g., calf intestinal alkaline phosphatase) to remove the 5′ triphosphate group and comprises a 3′ polyA tract.

[0976] In some embodiments, gRNAs can be modified at a 3′ terminal U ribose. For example, the two terminal hydroxyl groups of the U ribose can be oxidized to aldehyde groups and a concomitant opening of the ribose ring to afford a modified nucleoside as shown below:

[chemical structure]

wherein “U” can be an unmodified or modified uridine.

[0977] In another embodiment, the 3′ terminal U can be modified with a 2′3′ cyclic phosphate as shown below:

[chemical structure]

wherein “U” can be an unmodified or modified uridine.

[0978] In some embodiments, the gRNA molecules may contain 3′ nucleotides which can be stabilized against degradation, e.g., by incorporating one or more of the modified nucleotides described herein. In this embodiment, e.g., uridines can be replaced with modified uridines, e.g., 5-(2-amino)propyl uridine, and 5-bromo uridine, or with any of the modified uridines described herein; adenosines and guanosines can be replaced with modified adenosines and guanosines, e.g., with modifications at the 8-position, e.g., 8-bromo guanosine, or with any of the modified adenosines or guanosines described herein.

[0979] In some embodiments, sugar-modified ribonucleotides can be incorporated into the gRNA, e.g., wherein the 2′ OH-group is replaced by a group selected from H, —OR, —R (wherein R can be, e.g., alkyl, cycloalkyl, aryl, aralkyl, heteroaryl or sugar), halo, —SH, —SR (wherein R can be, e.g., alkyl, cycloalkyl, aryl, aralkyl, heteroaryl or sugar), amino (wherein amino can be, e.g., NH₂; alkylamino, dialkylamino, heterocyclyl, arylamino, diarylamino, heteroarylamino, diheteroarylamino, or amino acid); or cyano (—CN). In some embodiments, the phosphate backbone can be modified as described herein, e.g., with a phosphothioate group. In some embodiments, one or more of the nucleotides of the gRNA can each independently be a modified or unmodified nucleotide including, but not limited to 2′-sugar modified, such as, 2′-O-methyl, 2′-O-methoxyethyl, or 2′-Fluoro modified including, e.g., 2′-F or 2′-O-methyl, adenosine (A), 2′-F or 2′-O-methyl, cytidine (C), 2′-F or 2′-O-methyl, uridine (U), 2′-F or 2′-O-methyl, thymidine (T), 2′-F or 2′-O-methyl, guanosine (G), 2′-O-methoxyethyl-5-methyluridine (Teo), 2′-O-methoxyethyladenosine (Aeo), 2′-O-methoxyethyl-5-methylcytidine (m5Ceo), and any combinations thereof.

[0980] In some embodiments, a gRNA can include “locked” nucleic acids (LNA) in which the 2′ OH-group can be connected, e.g., by a C1-6 alkylene or C1-6 heteroalkylene bridge, to the 4′ carbon of the same ribose sugar, where exemplary bridges can include methylene, propylene, ether, or amino bridges; O-amino (wherein amino can be, e.g., NH₂; alkylamino, dialkylamino, heterocyclyl, arylamino, diarylamino, heteroarylamino, or diheteroarylamino, ethylenediamine, or polyamino) and aminoalkoxy or O(CH₂)ₙ-amino (wherein amino can be, e.g., NH₂; alkylamino, dialkylamino, heterocyclyl, arylamino, diarylamino, heteroarylamino, or diheteroarylamino, ethylenediamine, or polyamino).

[0981] In some embodiments, a gRNA can include a modified nucleotide which is multicyclic (e.g., tricyclo; and “unlocked” forms, such as glycol nucleic acid (GNA) (e.g., R-GNA or S-GNA, where ribose is replaced by glycol units attached to phosphodiester bonds), or threose nucleic acid (TNA, where ribose is replaced with a-L-threofuranosyl-(3′-2′)).

[0982] Generally, gRNA molecules include the sugar group ribose, which is a 5-membered ring having an oxygen. Exemplary modified gRNAs can include, without limitation, replacement of the oxygen in ribose (e.g., with sulfur (S), selenium (Se), or alkylene, such as, e.g., methylene or ethylene); addition of a double bond (e.g., to replace ribose with cyclopentenyl or cyclohexenyl); ring contraction of ribose (e.g., to form a 4-membered ring of cyclobutane or oxetane); ring expansion of ribose (e.g., to form a 6- or 7-membered ring having an additional carbon or heteroatom, such as for example, anhydrohexitol, altritol, mannitol, cyclohexanyl, cyclohexenyl, and morpholino that also has a phosphoramidate backbone). Although the majority of sugar analog alterations are localized to the 2′ position, other sites are amenable to modification, including the 4′ position. In an embodiment, a gRNA comprises a 4′-S, 4′-Se or a 4′-C-aminomethyl-2′-O-Me modification.

[0983] In some embodiments, deaza nucleotides, e.g., 7-deaza-adenosine, can be incorporated into the gRNA. In some embodiments, O- and N-alkylated nucleotides, e.g., N6-methyl adenosine, can be incorporated into the gRNA. In some embodiments, one or more or all of the nucleotides in a gRNA molecule are deoxynucleotides.

miRNA Binding Sites

[0984] microRNAs (or miRNAs) are naturally occurring cellular 19-25 nucleotide long noncoding RNAs. They bind to nucleic acid molecules having an appropriate miRNA binding site, e.g., in the 3′ UTR of an mRNA, and down-regulate gene expression. While not wishing to be bound by theory, it is believed that this down regulation occurs by either reducing nucleic acid molecule stability or inhibiting translation. An RNA species disclosed herein, e.g., an mRNA encoding Cas9, can comprise an miRNA binding site, e.g., in its 3′UTR. The miRNA binding site can be selected to promote down regulation of expression is a selected cell type. By way of example, the incorporation of a binding site for miR-122, a microRNA abundant in liver, can inhibit the expression of the gene of interest in the liver.

### EXAMPLES

[0985] The following Examples are merely illustrative and are not intended to limit the scope or content of the invention in any way.

### Example 1: Cloning and Initial Screening of gRNAs

[0986] This example discloses a method for evaluating chimeric gRNAs. The same approach may also be used to evaluate modular gRNAs.

Cloning gRNAs into Vectors

[0987] gRNA candidates targeting Exon II of human SERPINA1 were identified using a custom bioinformatics tool for guide RNA design. For each gRNA, a pair of overlapping oligonucleotides was designed and obtained. Oligonucleotides were annealed and ligated into a digested vector backbone containing an upstream U6 promoter and the remaining sequence of a long chimeric gRNA. Plasmids were sequence-verified and prepped to generate sufficient amounts of transfection-quality DNA. In certain embodiments, the U6 promoter may be replaced with an alternate promoter to drive in vivo transcription (e.g., H1 promoter) or in vitro transcription (e.g., a T7 promoter).

Cloning gRNAs into Linear dsDNA Molecules (STITCHR)

[0988] Each gRNA was generated as a STITCHR PCR fragment as previously described. A single oligonucleotide was designed and obtained for each gRNA. The U6 promoter and the gRNA scaffold (e.g., including everything except the targeting domain, e.g., including sequences derived from the crRNA and tracrRNA, e.g., including a first complementarity domain; a linking domain; a second complementarity domain; a proximal domain; and a tail domain) were separately PCR amplified and purified as dsDNA molecules. The gRNA-specific oligonucleotide was used in a PCR reaction to stitch together the U6 and the gRNA scaffold, linked by the targeting domain specified in the oligonucleotide. The resulting dsDNA molecules (STITCHR products) were purified for transfection. Any gRNA scaffold may be used to create gRNAs compatible with Cas9s from any bacterial species. In certain embodiments, the U6 promoter may be replaced with an alternate promoter to drive in vivo transcription (e.g., H1 promoter) or in vitro transcription (e.g., T7 promoter).

Initial gRNA Screen

[0989] To assess the activity of individual gRNAs, each STITCHR fragment encoding a U6-driven sgRNA was co-transfected with pAF003 into either HEK293 cells or hepatocellular carcinoma cell line Hep3B. The pAF003 plasmid encodes CMV-promoter driven S. aureus Cas9 with an N-terminal and a C-terminal Nuclear Localization Signal (NLS) and a C-terminal triple Flag tag (FIG. 16M, FIG. 17M). In certain embodiments, other cell types may be used for screening, including for example immortalized human cell lines such as 293T, K562 or U2OS, or primary human cells. The cells used for screening may be relevant to the eventual therapeutic cell target (e.g., an erythroid cell). The use of primary cells similar to the potential therapeutic target cell population may provide important information on gene targeting rates in the context of endogenous chromatin and gene expression. Transfections can comprise different gRNAs and different targeting approaches (17-mers, 20-mers, nuclease, dual-nickase, etc.) to determine which gRNAs/combinations of gRNAs give the greatest activity.

[0990] HEK293 cells were seeded on 24-well plates at a density of 100,000 cells/well 18 hours prior to transfection of STITCHR and pAF003 with Mirus TransIT-293® transfection reagent. Four days post transfection, genomic DNA (gDNA) was isolated from transfected cells followed by PCR amplification of a region of the hSERPINA1 locus encompassing all the potential DNA cleavage sites of the candidate gRNAs. Efficiency of cleavage with each gRNA was assessed by measuring NHEJ-induced indel formation at the target locus by T7E1 endonuclease assay. For the T7E1 assay, PCR amplicons were approximately 500-700 bp with the intended cut site placed asymmetrically in the amplicon. Following amplification, purification, and size-verification of PCR products, DNA was denatured and re-hybridized by heating to 95° C. and then slowly cooling. Hybridized PCR products were then digested with T7 Endonuclease I (or other mismatch-sensitive enzyme), which recognizes and cleaves non-perfectly matched DNA. If indels are present in the original template DNA, denaturation and re-annealing of the amplicons results in hybridization of DNA strands harboring different indels, leading to double-stranded DNA that is not perfectly matched. Digestion products may be visualized by gel electrophoresis or capillary electrophoresis. The fraction of DNA that is cleaved (density of cleavage products divided by the density of cleaved and uncleaved) may be used to estimate percent NHEJ using the following equation: % NHEJ=(1−(1−fraction cleaved)^{1/2}). The T7E1 assay is sensitive down to about 2-5% NHEJ. FIG. 9A shows the rates of indels induced by individual gRNAs at Exon II of hSERPINA1 when co-expressing U6-driven gRNA and saCas9 in HEK293 cells. Error bars represent standard error. Among the 22 gRNAs tested (see Table 10), the highest % NHEJ was observed with the gRNAs SERPINA1-2-r251, SERPINA1-2-r323, and SERPINA1-2-r959 (comprising the targeting domains of SEQ ID NOs:1390, 1462, and 2105, respectively).

[0991] Hep3B cells were nucleofected with STITCHR fragments and pAF003 using Lonza™ 4D-Nucleofector™ Kit SF with program EH-100. Nucleofection protocol for Hep3B cells was optimized by transfecting GFP-expressing plasmids with multiple nucleofection solutions and pulse codes and assaying GFP expression intensity by fluorescence microscopy within 24 hours. 250 ng of STITCHR and 750 ng of pAF003 were nucleofected into 50,000 Hep3B cells. Five days post nucleofection, gDNA was extracted followed by PCR amplification of hSERPINA1-Exon II and T7E1 endonuclease assay. FIG. 9B demonstrates the indel rates induced by co-expression of gRNA and saCas9 in Hep3B cells. Error bars represent standard error. In Hep3B cells, the highest % NHEJ was observed with the gRNAs SERPINA1-2-r251 and SERPINA1-2-r323 (comprising the targeting domains of SEQ ID NOs:1390 and 1462, respectively).

[0992] In certain embodiments, HEK293 and Hep3B cells (#HB-8064, ATCC, Manassas, VA) may be maintained and propagated in Dulbecco's Modified Eagle Medium (DMEM) and Eagle's Minimum Essential Medium (EMEM), respectively, and supplemented with 10% fetal bovine serum (FBS) at 37° C. with 5% CO₂. In certain embodiments, other methods may be used to assess cleavage efficiency, including for example include sequencing and use of mismatch-sensitive enzymes, e.g., Cell/Surveyor nuclease. For Sanger sequencing, purified PCR amplicons are cloned into a plasmid backbone, transformed, miniprepped and sequenced with a single primer. Sanger sequencing may be used for determining the exact nature of indels after determining the NHEJ rate by T7E1. For next-generation sequencing, amplicons may be 300-500 bp with the intended cut site placed asymmetrically. Following PCR, next-generation sequencing adapters and barcodes (for example Illumina multiplex adapters and indexes) may be added to the ends of the amplicon, e.g., for use in high throughput sequencing (for example on an Illumina MiSeq). This method allows for detection of very low NHEJ rates.

### Example 2: Construction and In Vivo Evaluation of gRNA/Cas9 AAV Vector for Knocking Out Expression of A1AT PiZ Allele (Approaches 2A. 2B)

[0993] As discussed previously, Alpha-1 antitrypsin deficiency (AATD) is the most common inherited genetic disease in the human liver. The predominant genotype of AATD patients with severe clinical manifestations is homozygous of the PiZ alleles (PiZZ), harboring a Z mutation (E342K) on the SERPINA1 locus. This point mutation at the hinge of the beta barrel and the Reactive Center Loop (RCL) of the AAT protein results in a self-inactivating “loop-sheet” confirmation that aggregates AAT-Z proteins inside the rough Endoplasmic Reticulum (rER) of hepatocytes during synthesis. There are two disease phenotypes associated with AATD. The gain-of-function phenotype stems from the aggregation of misfolded AAT-Z protein in rER, leading to cellular stress, inflammation, fibrosis, cirrhosis, and hepatocellular carcinoma (HCC). The loss-of-function phenotype is associated with the alveoli linings in the lung. AAT, a serum protease inhibitor and one of the most abundant proteins in serum, protects the airway from uncontrolled activity of proteases. The lack of AAT secretion from hepatocytes, together with the inferior elastase inhibitory activity of residual circulating AAT-Z proteins, shifts the balance between AAT and proteases in the lung. Over-digestion of the intracellular junctions and alveoli linings deteriorates the lung elasticity and pulmonary functions, leading to emphysema, a hallmark of Chronic Obstructive Pulmonary Disease (COPD).

[0994] The therapeutic options are extremely limited for patients with AATD. A small fraction of patients at the advanced stage of liver disease have undergone liver transplantation. Novel therapeutic regimens, including weekly-dosing of siRNA or Antisense Oligonucleotides (ASOs), have demonstrated promising preclinical and clinical results in reducing the AAT-Z load in hepatocytes. AAT protein augmentation therapy, the current standard-of-care for AATD lung emphysema in the developed world, involves weekly infusions of AAT purified from healthy blood donors, but does not reduce the risk of AATD liver diseases. Therefore, a one-time treatment for both liver and lung diseases presents a promising opportunity. It has been shown previously that the Type II Clustered Regularly Interspaced Short Palindromic Repeats (CRISPR) system from Staphylococcus aureus (saCas9) can be packaged into recombinant Adeno-associated Vectors (AAV) for in vivo studies (Ran 2013) because of the smaller coding sequence of saCas9 in contrast to the most well-studied Streptococcus pyogenes Cas9 (spCas9). In addition, previous studies demonstrated the therapeutic potential of combining zinc-finger nucleases delivered by AAV and AAV-mediated Homology-directed DNA Repair (HDR) in treating metabolic diseases in the liver (Sharma 2015; Wang 2015).

[0995] In this example, a gene editing approach was designed to treat AATD-associated diseases, which is mediated by Non-homologous End Joining (NHEJ) and Nonsense Mediated Decay (NMD) for treating the liver disease. This approach takes advantage of the high transduction efficiencies of hepatocytes by AAV8 viral vectors. As shown herein, an All-in-One AAV8-CRISPR targeting the early coding region of human SERPINA1 (hSERPINA1) significantly reduced the transcription and protein expression in hepatocytes in the adult PiZ transgenic mice. The phenomenon also correlated with down regulation of AAT-Z protein in serum and Periodic Acid-Schiff Staining after Diastase Treatment (PAS-D Staining). These results demonstrated the potential of gene editing strategies in treating genetic diseases with root causes from the liver.

All-In-One AAV8-CRISPR Vectors Disrupt hSERPINA1 Loci in PiZ Transgenic Mice

[0996] gRNA/Cas9 product prototypes were evaluated in PiZ transgenic mice to assess their efficiency and efficacy in knocking out expression of A1AT PiZ alleles in the liver. Two guide RNAs identified in Example 1 were selected for in vivo experiments: sgRNA-203 (also named SERPINA1-2-r251, Table 10) comprising the targeting domain of SEQ ID NO:1390, a G-initiating sequence with an NNGRRT PAM, and the most potent gRNA assayed in both cell lines; and sgRNA-333 (also named SERPINA1-2-r667, Table 10) comprising the targeting domain of SEQ ID NO:1811, an A-initiating sequence with an NNGRRV PAM. FIG. 18A shows the schematic representation of sgRNA-203 and sgRNA-333 on the human SERPINA1 locus.

[0997] It is well established that AAV8 is the most potent and naturally-occurring AAV serotype capable of transducing liver across species, from mice to dogs to non-human primates.

[0998] Therefore, the complete transgenes flanked by Inverted Terminal Repeats (ITRs) from the wildtype AAV2 genome were packaged into AAV8 capsids for in vivo studies (FIG. 18B). Four AAV8-CRISPR vectors (i.e., AAV-SS112, AAV-SS113, AAV-SS114, and AAV-SS115) were constructed to evaluate the contributions of two components in the vector system in achieving high gene editing in vivo. The overall configurations of AAV8-CRISPR were identical: an sgRNA driven by a human U6 promoter and saCas9 coding sequence flanked by two nuclear localization signals (NLS) and one C-terminal triple Flag tag. The two variable components were: (1) the targeting sequence of the sgRNA, sg203 or sg333; and (2) the promoter driving saCas9 expression, ubiquitous EFS promoter or liver-specific human Thyroxine Binding Globulin (TBG) promoter.

[0999] Briefly, plasmids containing the TBG promoter, EFS promoter, U6-driven sgRNA with different target sequences, saCas9, NLS's, a triple flag tag, and homology arms were synthesized. These components were cloned into the pTR-UF-11 plasmid (#MBA-331, ATCC, Manassas, VA) to obtain the All-in-One AAV8-CRISPR vectors. Multiple cloning sites at the junction of each component allow subcloning of different elements in this AAV8-CRISPR vector system. All AAV vectors were designed and cloned to be within the 4.7 kb packaging limit including both ITRs. The proviral vectors were packaged into capsids from AAV8 in HEK293 cells using the “triple-transfection” method at Vector Core, University of Massachusetts Medical School (Grieger 2006). Recombinant AAV8 vectors were purified by CsCl-gradient centrifugations and titered by qPCR and Digital Droplet PCR (ddPCR) using primers and probes specific to the transgenes.

[1000] The transgenic AAV vectors packaging pSS112 (FIG. 16E, FIG. 17E), pSS113 (FIG. 16F, FIG. 17F), pSS114 (FIG. 16G, FIG. 17G), and pSS115 (FIG. 16H, FIG. 17H) (“Vector A” in FIG. 10) are denoted AAV-SS112, AAV-SS113, AAV-SS114, and AAV-SS115, respectively. Plasmid pSS112 is a proviral AAV vector encoding U6 promoter-driven gRNA 2-r251 (i.e., sg203) (comprising the targeting domain of SEQ ID NO:1390) and EFS promoter-driven saCas9.

[1001] Proviral vector pSS113 encodes U6 promoter-driven gRNA 2-r667 (i.e., sg333) (comprising the targeting domain of SEQ ID NO:1811) and EFS promoter-driven saCas9. Proviral vector pSS114 encodes U6 promoter-driven gRNA 2-r251 (i.e., sg203) (comprising the targeting domain of SEQ ID NO:1390) and TBG promoter-driven saCas9. Proviral vector pSS114 encodes U6 promoter-driven gRNA 2-r667 (i.e., sg333) (comprising the targeting domain of SEQ ID NO:1811) and TBG promoter-driven saCas9. The components of these and other expression vectors used in the present examples are summarized in Table 11.

[1002] Transgenic mouse models of AATD have been established previously to study the pathology of the liver phenotype of AATD (Sifers 1987; Carlson 1989). A transgenic mouse model was established and proven to be a critical tool in understanding AATD liver diseases and evaluating novel therapeutics. The complete 14.4kb of hSERPINA1 locus was isolated from a PiMZ patient to generate a few transgenic lines, one of which is PiZ-11.03 (PiZ mice). This PiZ transgenic mouse model harbors 16 copies of the human SERPINA1 (hSERPINA1) transgene and recapitulates the progression and characteristics of A1AT liver diseases. High levels of circulating human AAT-Z and the abundant retention of misfolded AAT-Z proteins in hepatocytes are observed in these PiZ mice beginning at early developmental stages. Later, accumulation of AAT-Z protein stimulates ER stress and apoptosis of hepatocytes. Hepatocytes with less AAT-Z retention further increase the risk of hepatocellular carcinoma (HCC) by compensating injured cells. The PiZ transgenic mice have no lung disease phenotypes due to the intact mouse SERPINA1 loci. Therefore, the applications of the PiZ transgenic mouse model are limited to assessing only the liver abnormalities. However, the entirety of all the exons, introns, and the Z mutations in this mouse model provides the correct genetic context to evaluate gene editing approaches.

[1003] PiZ mice were bred and maintained in an AAALAC-accredited facility at Saint Louis University (SLU) School of Medicine as described in Carlson 1989. All procedures were performed in accordance with the animal protocol approved by the Institutional Animal Care and Use Committee (IACUC) at SLU. Mice homozygous for the human PiZ alleles were bred with C57B6 males (Jackson Laboratories) to obtain heterozygous offspring with AAT serum levels similar to that from human PiZZ patients. Studies were conducted with 6- to 16-week old heterozygous mice. Dosing groups were designed to include at least one PBS control animal in each litter of animals.

[1004] Using a surrogate AAV8-CRISPR vector targeting mouse coagulation Factor VII (mFVII), the Minimum Effective Dose (MED) of this AAV8-CRISPR vector system was determined to be 5e13 vg/kg in mice (data not shown). Mixed-gender PiZ mice at the age of 5-14 weeks old were first bled on Day-2 and 30 minutes prior to dosing to measure the baseline values of serum human AAT (hAAT) concentrations. Next, the mice were administered the PBS control or one of the four All-in-One AAV8-CRISPR vectors at a dose of 5e13 vg/kg through tail vein injections. Each group (i.e., the PBS control group and each vector group) contained 5 mice. Mice were bled weekly throughout the in-life portion of the experiments. On Day 35 post injection, animals were sacrificed and liver samples were processed for molecular biology and histology analysis (FIG. 18C). In certain embodiments, the mice may be administered PBS or 1×10¹² μg of the AAV viral vectors in 200 μL total volume via tail vein injections.

[1005] Genome modifications introduced by the All-in-One AAV8-CRISPR vectors (i.e., AAV8-SS112, AAV8-SS113, AAV8-SS114, or AAV8-SS115) were first analyzed at Day 35 post injection. Genomic DNA (gDNA) extracted from the homogenized livers dosed with PBS or one of the four AAV8 vectors were analyzed using T7 Endonuclease I (T7EI) assay (M0302, New England BioLabs)). Briefly, genomic DNA was extracted from liver pulverized by a Geno/Grinder (SPEX SamplePrep) using DNAdvance Kits (Agencourt) on a liquid-handling robot per the manufacturer's instructions. To quantify indel percentage at target genomic loci, T7EI assays were conducted as described previously (Friedland 2015) using PCR primers OliSS76 (SEQ ID NO:2199) and OliSS82 (SEQ ID NO:2200) in Table 16. Specifically, AAV8-SS112 (sgRNA203/EFS), AAV8-SS113 (sgRNA333/EFS), AAV8-SS114 (sgRNA203/TBG), and AAV8-SS115 (sgRNA333/TBG) introduced 20%, 8%, 16%, and 20%, respectively, of indel rate at their corresponding DNA cut sites (FIG. 18D). In certain embodiments, Next Generation Sequencing (NGS) may be used to assess the specific DNA disruptions.

[1006] Next, the transcription levels (Cq) of hSERPINA1 in these PiZ mice were quantified using qRT-PCR amplifying the junctions between Exons III and IV of hSERPINA1 from total RNA extracted using primers oliMES103 and oliMES108 in Table 16. Briefly, total RNA was extracted from pulverized liver samples using RNeasy Mini Kits (Qiagen). RNA concentration and integrity were assayed using RNA 600 Nano Kits (Agilent) on a Bioanalyzer (Agilent) to determine an RNA Integrity Number (RIN) greater than 6.5. RNA was treated using a Turbo DNA-free Kit (Ambion) and reverse-transcribed using Superscript III RT (Invitrogen). Quantitative real-time PCR (qRT-PCR) was performed on a BioRad CFX384 with SYBR Green I Master (Roche). Cq values of hSERPINA1 were first normalized to the corresponding values of mouse beta-2-microglobulin (B2M) from each animal to obtain ACq using primers oliMES101 and oliMES102 in Table 16. The ACq value from each AAV8-CRISPR-treated mouse was then normalized to the one from the corresponding littermate treated with PBS to obtain ΔΔCq, representing changes of hSERPINA1 expression. Interestingly, a more prominent reduction of hSERPINA1 transcription measured by qRT-PCR was observed as compared to levels of gene modifications measured by T7E1 (compare FIG. 18E with FIG. 18D, respectively). Two AAV8 vectors with the TBG promoter driving saCas9 showed 94% (AAV8-SS114) and 96% (AAV8-SS115) reduction of hSERPINA1 expression compared to the PBS-treated group, while mice treated with AAV8-SS113 only showed 63% reduction, which was likely due to the combination of a less active sgRNA-303 and a less efficient EFS promoter (FIG. 18E).

[1007] The transcription results were further supported by whole-transcription RNAseq analysis on representative samples. Briefly, total RNA was extracted from pulverized liver samples using RNeasy Mini Kits (Qiagen). RNA concentration and integrity were assayed using RNA 600 Nano Kits (Agilent) on a Bioanalyzer (Agilent) to determine an RNA Integrity Number (RIN) greater than 6.5. RNA was treated Turbo DNA-free Kit (Ambion) and reverse-transcribed using Superscript III RT (Invitrogen). RNAseq library preparations and HiSeq runs were conducted at Genewiz. Ribosomal RNA depletion was performed prior to stranded RNA library preparation. Data were analyzed in-house and visualized with Integrative Genomics Viewer (The Broad Institute). By comparing the total reads mapped to the hSERPINA1 transcript, the animals treated with vectors with the TBG promoter showed 90% reduction of expression (data not shown). The mouse treated with AAV8-SS113 demonstrated 58% knock-down of hSERPINA1 transcription compared to the mouse dosed with PBS (data not shown). In conclusion, the efficacy of these four AAV8-CRISPR vectors in knocking down hSERPINA1 transcription in adult PiZ mice ranks AAV8-SS115 (sgRNA-333/TBG)=AAV8-SS114 (sgRNA-203/TBG)>AAV8-SS112 (sgRNA-203/EFS)>AAV8-SS113 (sgRNA-333/EFS).

[1008] Deep sequencing results of the remaining transcripts revealed high levels of nucleotide substitutions and/or indels near the cut site. For instance, in one animal treated with AAV8-SS115, there were 50% gene modifications on Exon II in the remaining 7% of transcripts (FIG. 18F). These molecular analyses suggest that AAV8-CRISPR targeting the early exon of hSERPINA1 knocks down AAT-Z protein expression by disrupting the coding sequences and, potentially, inhibiting gene transcription.

### AAV8-CRISPR Treatment Reduces AAT-Z Proteins in Circulation and in Hepatocytes of Transgenic Mice

[1009] Next, the phenotypic changes in the PiZ mice transduced by AAV8-CRISPR vectors targeting Exon II of hSERPINA1 were analyzed. The majority of AAT proteins are synthesized in rER of hepatocytes and secreted to the blood circulation to function as a protectant of the lung epithelium. AAT proteins with the Z mutation (AAT-Z) form aggregates in hepatocytes and, therefore, are unable to be released to the blood stream.

[1010] Here, the concentration of human AAT in the circulation of the PiZ mice was measured as a biomarker of gene disruption in the liver. An ELISA assay with a human-specific AAT antibody was performed to minimize the background interference of mouse AAT in the PiZ mice. Briefly, blood samples were collected by tail nicking at interval time points and by cardiac puncture at terminal time points. Blood was further processed into serum and kept frozen in −80° C. Human AAT ELISA Kit (ab108799, Abcam) was used to measure the absolute concentrations of human AAT in serum samples from the PiZ transgenic mice. Serum samples were thawed on ice and diluted in a supplied assay buffer containing 0.01% naïve C57BL/6 mouse serum. A standard curve was prepared by reconstituting the supplied recombinant AAT as per the supplied protocol to 100 ng/ml and serial dilutions to 0.137 ng/ml. After antibody incubation and exposure steps, the plate was read on an Envision (Perkin Elmer, Santa Clara, CA) at the absorbance of 450 nm. A standard curve was calculated and fitted to a 4-parameter sigmoidal curve (Graph Pad Prism, La Jolla CA) using the background corrected Absorbance values for each standard. For each serum sample, the dilution(s) lying in the linear range of the standard curve were extrapolated to generate raw values. The raw values were adjusted by multiplying by the dilution to give the actual value in serum in ng/ml. If there were two values in the linear range, both values were calculated and then averaged.

[1011] During the course of the in-life portion of the studies, mice were bled at Days-2, 0, 7, 14, 21, 28, and 35 post injections. The day of injections counts as Day 0. Starting from Day 7, a significant reduction of circulating AAT was observed in mice dosed with AAV8-SS114 and AAV8-SS115, and then a plateau was observed around Day 14 (FIG. 19A). At the terminal bleeding on Day 35, mice treated with AAV8-SS115 (sgRNA-333 & TBG promoter) showed more than two-log of AAT reduction. In contrast, circulating AAT concentrations in the AAV8-SS113 (sgRNA-333 & EFS promoter) group were reduced by only 44% compared to the corresponding values from the same animals on Day 0.

[1012] A histology analysis was conducted next to investigate the effect of gene disruption on AAT-Z retention in the hepatocytes of PiZ mice. AAT proteins are highly glycosylated and therefore can be visualized using Periodic Acid-Schiff Staining after Diastase Treatment (PAS-D) staining that reacts with the hydroxyl groups on glycans. Briefly, liver tissues were collected, fixed in 10% buffered formalin, embedded in paraffin, and sectioned into 5 um slices. Sections were stained with PAS-D to visualize AAT aggregation in hepatocytes, followed by quantitation of globule counts and total globule area using ImageJ (Rasband W. S., National Institutes of Health, USA). Three random areas were imaged and analyzed for each liver sample. Slides of (Haemotoxylin and Eosin) H&E staining were also imaged to visualize general morphology and AAT aggregates.

[1013] Positive PAS-D staining in PBS-treated mice were identified as punctuated purple (dark grey in figures) dots under white-field microscope (FIGS. 19B and 22). In PiZ transgenic mice, AAT globules form in the livers after birth and grow over time. By 4 weeks of age, clusters of hepatocytes could be detected by PAS-D staining. In the adult mice that were treated, the terminal collection happens around age of 10-19 weeks. Compared to the PBS group, the treatment groups showed dramatic changes in the total number and size of AAT globules as analyzed by ImageJ (FIGS. 19C & 19D). To support this observation, the soluble and insoluble fractions of the homogenized PiZ livers were separated to differentiate secreted and aggregated forms of AAT-Z (FIG. 19E). Proteins were analyzed by Western blotting with a human AAT specific antibody. Briefly, soluble and insoluble fractions of AAT were isolated as previously described (An 2005). In short, liver tissues were homogenized with a chilled Dounce homogenizer and sheared by passing through a 28-gauge needle. Total protein content was determined to aliquot 5 μg of total liver lysate from each sample. After centrifugation at 10,000 g for 30 minutes at 4° C., supernatant was immediately separated from the insoluble layer with care. Both fractions were re-suspended and denatured prior to being loaded on SDS-PAGE gels. Human AAT protein was probed using a Goat Anti-human Alpha-1 antitrypsin antibody (cat #80502, DiaSorin, Saluggia, Italy) and a HRP conjugated Rabbit anti-Goat IgG antibody (cat #P0449, Agilent, Santa Clara, CA). Mouse GAPDH was probed as loading control. Scanned blots were analyzed using ImageJ (Rasband W. S., National Institutes of Health, USA).

[1014] As measured by Western blotting, AAV8-CRISPR treatment with TBG promoter-driving saCas9 completely abrogated the soluble AAT in liver lysates (FIG. 19F). In the same mice, AAT contents in the insoluble fractions were also reduced by 77% compared to the PBS group (FIG. 19G). In addition, no dramatic changes were observed in hepatocyte morphology, aspartate aminotransferase (ALT), or circulating albumin levels after AAV8-CRISPR treatment, indicating minimal liver toxicity (FIGS. 23A-C). These results suggest that the CRISPR/Cas9 system delivered by AAV8 vectors elicits prolonged hSERPINA1 inhibition in PiZ mice that significantly reduces the AAT contents in both circulation and hepatocytes. This study demonstrates the efficiency of sgRNA 2-r251 (sg203) and sgRNA 2-r667 (sg333) (comprising the targeting domains of SEQ ID NOs:1390 and 1811, respectively) in knocking out hSERPINA1-PiZ expression in vivo, and compares the EFS and TBG promoters in driving saCas9 expression in murine liver tissues.

[1015] In this example, two-tailed Student t tests and one-way ANOVA with Bonferroni multiple comparison post-test were performed using Excel and GraphPad Prism 7 (GraphPad, San Diego, CA). Statistical significance was assumed with a p-value <0.05 (*), <0.01 (**), and <0.001 (***). Error bars shown in the figures represent s.e.m. unless noted otherwise.

[1016] In certain embodiments, a PiZ transgenic mice may be generated as follows: PiZ alleles of hSERPINA1, including the 2 kb flanking sequences, may be cloned from a PiMZ heterozygous individual and microinjected into C57Bl/6 mouse embryos. In these embodiments, one of the transgenic mouse strains harboring multiple copies of the PiZ transgene recapitulates the liver pathology of A1AT deficiency in patients. This mouse model has been previously analyzed to shed light on the formation of intrahepatocytic globules, inflammations, cell regeneration, hyperplasia, and tumorigenesis due to PiZ-A1AT aggregation (An 2005; Lindblad 2007).

### Example 3: Construction and Evaluation of AAV Vector to Express A1AT (Approach 2B)

### Vector Construction

[1017] The coding sequence (CDS) of hSERPINA1 was extracted from USCS Genome Browser and synthesized. This coding sequence, together with Kozak sequence, was subcloned into pAF003 to replace the coding sequence between the CMV promoter and the bovine growth hormone polyadenylation signal (bGH polyA) to generate an expression vector dubbed pSS111 (Table 11; FIG. 16D, FIG. 17D).

[1018] The CMV-A1AT-bGHpolyA moiety on pSS111 was subcloned between two AAV2 ITRs to generate an AAV proviral vector encoding A1AT, pSS111-1 (FIG. 16C, FIG. 17C) (“Vector B” in FIG. 10). Using restriction cloning, the promoter driving expression of A1AT may be readily switched to constitutive promoters or tissue-specific promoters, including for example TBG promoter, hA1AT promoter, or ApoE enhancer followed by hA1AT promoter. These AAV proviral vectors may be packaged into AAV serotypes and administered in animal models of A1AT deficiency to evaluate the gene augmentation activity in the aforementioned gene editing approach.

### Evaluation of A1AT Expression

[1019] U2OS and Hep3B cell lines were transfected with pSS111 to assess vector functionality in terms of A1AT expression. The SERPINA1 locus has been shown to transcribe actively in cell lines originated from liver, including Hep3B, but not in U2OS, an osteosarcoma cell line (Barretina 2012). Vector pSS111 was nucleofected into either U2OS cells with the SE kit and program DN-100, or Hep3B cells with the SE kit and program 96-FF-120. At 3 days and 5 days post transfection, the bulk population of transfected cells were lysed with RIPA buffer to extract cytoplasmic proteins. 80 μl of total protein lysates were loaded in each lane on a 4-12% Tris-Bis PAGE gel. Post electrophoresis and transfer, the blots were blocked and incubated with a mouse monoclonal antibody recognizing human A1AT (Abcam-9399) followed by a secondary antibody, HRP-conjugated goat anti-mouse IgG (Santa Cruz Biotechnology, sc-2005), to visualize A1AT expression. GAPDH bands were probed by a rabbit monoclonal antibody (Cell Signaling Technologies, CST-14C10) followed by HRP-conjugated donkey anti-goat IgG. As shown in FIG. 11, endogenous and ectopic expression of A1AT was observed in both U2OS (lanes 1-3) and Hep3B (lanes 4-6) cells at 3 days (lanes 2 & 5) and 5 days (lanes 3 & 6) post nucleofection.

### Example 4: In Vivo Assessment of the Therapeutic Effects of Simultaneous Knockout of PiZ Alleles and Augmentation of A1AT Expression (Approach 2B)

[1020] To test the combination of gene knockout and gene augmentation, the most potent All-in-One AAV vectors from Example 2 (i.e., AAV-SS112, AAV-SS113, AAV-SS114, and/or AAV-SS115) are co-administered with AAV vectors from Example 3 packaging pSS111-1. 1×10¹¹ μg of AAV-SS111-1 and 1×10¹¹ μg of All-in-One AAV vector are administered into PiZ transgenic mice via tail vein injections. Tissues are collected at 14, 28, and 56 days post injection and analyzed for gene modification, A1AT aggregation in hepatocytes, hSERPINA1 expression in liver and serum, and biodistribution of saCas9 protein. Results from this experiment support the use of CRISPR/Cas9-mediated gene knockout in combination with hSERPINA1 gene augmentation to treat A1AT deficiency in PiZZ homozygous patients.

### Example 5: Design and Screening of gRNAs Targeting Exon V of hSERPINA1 (Approach 1A)

[1021] gRNAs were designed to target the region spanning from 200 bp upstream to 200 bp downstream of the Z mutation (E342K) on Exon V to introduce DNA disruption near E342K on PiZ alleles (FIG. 12). gRNA candidates were identified using a custom bioinformatics tool for guide RNA design. 250 ng of each STITCHR fragment encoding a U6-driven sgRNA and 750 ng of pAF003 were nucleofected into 100,000 Hep3B cells with the SE kit and program 96-FF-120 on a Lonza™ 96-well shuttle system. Three days post nucleofection, gDNAs were extracted, followed by PCR amplification of the region flanking E342 on Exon V. T7E1 endonuclease assay was used to compare the indel rates induced by individual gRNA sequences as shown in FIG. 13. Among the 23 gRNAs tested (see Table 12), the highest % NHEJ was observed with the gRNAs SERPINA1-1A-r181, SERPINA1-1889, SERPINA1-1970, SERPINA1-1A-r174, and SERPINA1-1A-r152 (comprising the targeting domains of SEQ ID NOs:433, 2191, 2192, 426, and 404, respectively).

### Example 6: Design and Optimization of ssODN Donors for In Vitro HDR at the Point Mutation in hSERPINA1 (Nucleotide c.1024G>A) Encoding the Z-Mutation E342 (Approach 1A)

[1022] gRNA 1889 (sgRNA1889) (comprising the targeting domain of SEQ ID NO:2191) demonstrated a 37.8% indel rate in Hep3B cells in Example 5. The hSERPINA1 target domain complementary to sgRNA1889 includes the nucleotide c.1024, the mutation of which from G>A results in the Z mutation (E342K). The targeting domain sequence of sgRNA1889 (SEQ ID NO:2191, Table 12) is complementary to the hSERPINA1 wild-type M allele in Hep3B cells (see nucleotides 13978 to 13999 in SEQ ID NO:2231). The corresponding sgRNA for targeting PiZ alleles, SERPINA1-1A-r454 (sgRNA1889Z; SEQ ID NO:706), is complementary to the Z allele, i.e., nucleotides 13978 to 13999 in SEQ ID NO:2231 with the Z mutation c.1024G>A mutation (bold and underscored) (Table 12). The close proximity (4 bp) between the DNA double-strand break induced by sgRNA1889 and the Z mutation suggested that sgRNA1889 could be used to evaluate HDR that can be used to alter the Z mutation to the wild-type M allele.

[1023] The goal in this example was to improve the rate of HDR near the nuclease cut sites (breaks) to correct the A>G nucleotide mutation in the SERPINA1 gene causing the E342K amino acid change in PiZ patients by using single-stranded oligodeoxynucleotides (ssODN) paired with double-stranded DNA breaks and homology templates. When used in combination with non-viral delivery modalities, ssODN can be efficiently delivered to hepatocytes. Therefore, this HDR approach bears significant therapeutic potential.

[1024] Due to the lack of a cellular system harboring the Z-mutation, wild-type Hep3B cells were used as a proof-of-concept model to optimize the configurations of ssODN. All of the ssODN constructs used were designed to introduce the Z-mutation as a readout to assess the ability of the ssODNs to improve HDR frequencies. Upon optimization, the best ssODN configuration can be altered to correct the Z mutation in transgenic mouse models and patients, instead of introducing the Z mutation.

[1025] Determination of gene targeting frequency involves measuring the percentage of alleles that have undergone homologous directed repair (HDR) with the exogenously provided donor template or endogenous genomic donor sequence and which therefore have incorporated the desired correction. If the desired HDR event creates or destroys a restriction enzyme site, the frequency of gene targeting may be determined by a RFLP assay. If no restriction site is created or destroyed, sequencing may be used to determine gene targeting frequency. If a RFLP assay is used, sequencing may still be used to verify the desired HDR event and ensure that no other mutations are present. If an exogenously provided donor template is employed, at least one of the primers is placed in the endogenous gene sequence outside of the region included in the homology arms, which prevents amplification of donor template still present in the cells. Therefore, the length of the homology arms present in the donor template may affect the length of the PCR amplicon. PCR amplicons can either span the entire donor region (both primers placed outside the homology arms) or they can span only part of the donor region and a single junction between donor and endogenous DNA (one internal and one external primer). If the amplicons span less than the entire donor region, two different PCRs should be used to amplify and sequence both the 5′ and the 3′ junction. If the PCR amplicon is short (less than 600 bp) it is possible to use next generation sequencing. Following PCR, Next Generation Sequencing (NGS) adapters and barcodes (for example Illumina multiplex adapters and indexes) may be added to the ends of the amplicon, e.g., for use in high throughput sequencing (for example on an Illumina MiSeq). This method allows for detection of very low gene targeting rates. If the PCR amplicon is too long for NGS, Sanger sequencing can be performed. For Sanger sequencing, purified PCR amplicons will be cloned into a plasmid backbone (for example, TOPO cloned using the LifeTech Zero Blunt® TOPO® cloning kit), transformed, miniprepped, and sequenced. The same or similar assays described above can be used to measure the percentage of alleles that have undergone HDR with endogenous genomic donor sequence and which therefore have incorporated the desired correction.

[1026] To evaluate in vitro HDR efficiency at the nucleotide sequence encoding amino acid E342 of hSERPINA1 in Hep3B cells, four ssODNs having different configurations were designed and synthesized (Table 13). ssODN_1, ssODN_2, and ssODN_3 contain sequences from the transcription strand of the hSERPINA1 locus, and ssODN_4 contains sequences from the non-transcription strand (FIG. 25). As listed in Table 13, each ssODN presents a different level of asymmetry relative to the double-stranded break formed by saCas9 and sgRNA-1889 (FIG. 25). There are four sets of single nucleotide polymorphisms (SNPs) resulting in 10 mutations that are introduced by each ssODN donor. The first set of SNPs introduce the Z-mutation (GAG>AAA as shown in the bold and shaded sequence in Table 13). The second set of SNPs introduce an MfeI restriction site on the target sequence to quantify HDR efficiency using a restriction fragment length polymorphism (RFLP) assay, which also disrupts the recognition of the PAM sequence of sgRNA1889 and the genomic DNA post HDR events (underscored and lowercase letters in Table 13). The third set of SNPs disrupt the recognition of the PAM sequence of sgRNA1889 and the genomic DNA post HDR events (bold and italicized nucleotides in Table 13). The fourth set of SNPs prevent sgRNA re-recognition and Cas9 re-cutting post HDR events (underscored nucleotides in Table 13).

[1027] In ssODN_1, the 5′ and 3′ homology arms are 88 nt and 77 nt in length, respectively, from the double-stranded DNA break induced by sgRNA1889. In ssODN_2, the 5′ and 3′ homology arms are 99 nt and 66 nt in length, respectively, from the Cas9 cut site (break). The length for the 5′ and 3′ homology arms from the Cas9 break in ssODN_3 are 66 nt and 99 nt, respectively. ssODN_4 is the reverse complement of ssODN1.

[1028] ssODN_1 was co-transfected with a STITCHR fragment encoding sgRNA1889 (comprising the targeting domain of SEQ ID NO:2191) and plasmid pSS79 encoding a codon-optimized saCas9 with an N-terminal NLS, a C-terminal NLS, and a C-terminal triple Flag tag (FIG. 16L, FIG. 17L) in Hep3B cells to mutate the E342 coding sequence in the hSERPINA1 loci (i.e., resulting in the mutation G>A at nucleotide c.1024 (the Z mutation)). Briefly, 750 ng of pSS79, 250 ng of STITCHR fragment, and 25 pmol of ssODN_1 were nucleofected in 100,000 Hep3B cells with a 96-well Nucleofector Kit SE and program 96-FF-120. Five days post transfection, transfected cells were collected and gDNAs were extracted to amplify a 1 kb region flanking the nucleotide sequence that encodes the amino acid E342. Gene editing events introduced by saCas9 and HDR were quantified by T7E1 endonuclease assay. The total frequency of gene modification was found to be 62.0% (Table 14). Using the MfeI site on the HDR donor sequence, RFLP analysis determined the total HDR frequency to be 17.1%. In order to categorize the specific gene editing events, this 1 kb amplicon from the modified Hep3B cells also underwent TOPO cloning followed by Sanger sequencing, and NextGen Sequencing with MiSeq. As shown in Table 14, 32.0% of alleles underwent HDR events that introduced all 10 mutations present in the ssODN_1, while 59.7% of the editing events were NHEJ-type and 8.3% of the alleles remained unmodified.

[1029] In order to assess the HDR events mediated by different configurations of ssODN donors in vitro, Hep3B cells were nucleofected with a Nucleofector Kit SE and program 96-FF-120 on a Lonza™ 96-well shuttle system. Each triple transfection of 100,000 Hep3B cells includes 750 ng of pSS79 encoding a codon-optimized saCas9 driven by a CMV promoter (see Table 11), 250 ng of STITCHR fragment encoding a U6-driven sgRNA1889, and 25 pmol of ssODN oligo. Five days post nucleofection, cells were lysed to extract gDNA, and a region flanking the target sequence of sgRNA1889 was amplified by PCR. Total gene modification mediated by NHEJ and HDR was assessed by T7E1 endonuclease assay. In addition, RFLP assays were carried out with MfeI-HF as described above to quantify the HDR frequencies. As shown in FIG. 14A, the frequencies of total gene modifications as measured by T7E1 assays were not significantly different. However, the HDR frequency mediated by ssODN_2 (37.76% in RFLP assay with MfeI-HF) was significantly higher than those mediated by other ssODN donors (FIG. 14B).

[1030] The PCR amplicons from hSERPINA1-ExonV were cloned into a TOPO vector backbone using the Zero-Blunt TOPO cloning kit (Life Technologies) and transformed into chemically competent TOP10 cells according to the product manual. Each bacterial colony representing one sequence variant was isolated and sequenced. The pooled sequences were analyzed for their specific gene modification events. As shown in Table 15, Hep3B cells co-transfected with pSS79, STITCHR sgRNA1889, and ssODN_2 demonstrated 50.0% HDR events, while the frequency with ssODN_1 was 25.0%. NHEJ-type DNA repair events induced by CRISPR/Cas9 were 50.0% with ssODN_2 and 75.0% with ssODN_1.

[1031] These results show that a 5′-extended ssODN donor (relative to the gRNA cleavage site) induces higher HDR frequencies compared to a 3′-extended donor template or a ‘balanced’ HDR donor with similar length of 5′ and 3′ homology arms relative to the Cas9 break on the hSERPINA1 locus in Hep3B cells. In addition, donors designed to anneal to either strand of DNA do not demonstrate significant differences in mediating HDR events on the hSERPINA1 locus in Hep3B cells.

[1032] To assess in vitro HDR events mediated by other configurations of ssODN donors, three additional ssODN donors, ssODN_5, and ssODN_6, ssODN_7, were developed that contain sequences from the non-transcription strand (FIG. 25). ssODN_5, and ssODN_6, and ssODN_7 present a different level of asymmetry near the double-stranded break by saCas9 and sgRNA-1889 (Table 13, FIG. 25). Similar to the other four ssODNs, each ssODN includes four sets of single nucleotide polymorphisms (SNPs), resulting in 10 mutations, as shown in Table 13.

[1033] Briefly, 100,000 Hep3B cells were nucleofected with 750 ng of plasmid pSS79 expressing saCas9, 250 ng of PCR fragment containing U6 promoter driving sgRNA-1889 (comprising the targeting domain of SEQ ID NO:2191), and 2.5 pmol of ssODN (i.e., ssODN_1, ssODN_2, ssODN_2, ssODN_3, ssODN_4, ssODN_5, ssODN_6, or ssODN_7), using SE nucleofection solution and program 96-FF-120. Three days post transfection, genomic DNA samples were collected from these cells and were subjected to Next-Gen Sequencing (NGS) to quantify the total indel rate and the HDR rate near the cut site (break) of sgRNA-1889 on Exon V of hSERPINA1 in Hep3B cells. As shown in FIG. 26, ssODN_1 yielded 50.35% of total indel rate on hSERPINA1-ExonV, while ssODN_7 led to 82.61% indel rate with the same cut site (break). In terms of HDR frequencies, ssODN_1 (the sequence from the transcription strand and symmetrical relative to the break) resulted in 41.53% on Exon V. Intriguingly, ssODN_2 (the sequence from the transcription strand and 60%:40% imbalanced on the 5′-end of the break) showed the highest HDR rate of 44.80% near the break of sgRNA-1889, as quantified by NGS analysis. In contrast, ssODN_3 with a 40%:60% imbalanced sequence relative to the break showed 33.49% HDR correction. All four of the ssODNs with sequences from the non-transcription strand (i.e., ssODN_4, ssODN_5, ssODN_6, ssODN_7) yielded HDR frequencies less than 31%.

[1034] In sum, ssODNs with the sequence from the transcription strand and a 50%:50% or 60%:40% 5′ homology arm-to-3′ homology arm asymmetry relative to the DNA double-stranded break led to the highest HDR rate near the nuclease cut site (break). In the context of the wild-type hSEPRINA1 sequence, ssODN_1 and ssODN_2 were the optimal configurations to introduce point mutations to alter the E342 amino acid on hSERPINA1 protein.

[1035] In the context of PiZ patients or transgenic mouse models, ssODN_1_Z mutation or ssODN_2_Z mutation (Table 13) may be used with saCas9 (recognizing PAM:CTGAAG) and sgRNA1889Z (comprising the targeting domain of SEQ ID NO:706) to target the Z mutation to achieve a high rate of HDR correction of the mutation K342 back to wildtype E342, therefore curing the Z-mutation.

[1036] In conclusion, CRISPR/Cas9 targeting the Z mutation can be combined with ssODN to correct the Z mutation in AATD patients as human therapeutics. In certain embodiments, the optimal configuration of the candidate ssODN molecules may include, but are not limited to, (1) sequences from the transcription strand of the genetic locus, and (2) close to 50%-50% and 60%-40% asymmetry of the 5′-homology arm-to-3′ homology arm asymmetry relative to the DNA double-stranded break. In certain embodiments, the therapeutics may be composed of, without limitation, (1) viral delivery of Cas9 coding sequences, viral delivery of gRNA sequence, non-viral delivery of ssODN, (2) viral delivery of Cas9 coding sequences, non-viral delivery of gRNA sequence, non-viral delivery of ssODN, (3) non-viral delivery of Cas9 DNA or mRNA, viral delivery of gRNA sequence, non-viral delivery of ssODN, or (4) non-viral delivery of Cas9-gRNA RNP complexes, and non-viral delivery of ssODN.

### Example 7: Design of AAV Vectors for Delivering HDR Templates (Approach 1A)

[1037] AAV has been previously demonstrated to promote HDR ex vivo and in vivo in the presence of endonuclease-induced dsDNA breaks (Sharma 2015; Wang 2015a; Wang 2015b). The mechanism of AAV-mediated HDR was suggested to involve the single-stranded nature of the AAV genome and protection of HDR templates by the hairpin structures of the ITRs.

[1038] A dual-vector AAV system was constructed for CRISPR/Cas editing of DNA sequences (FIG. 15). To evaluate this dual-AAV vector system, four AAV proviral vectors were constructed and cloned: pSS99-1 (FIG. 16A, FIG. 17A), pMESO2, pMES06 (FIG. 16J, FIG. 17J), and pMES08 (FIG. 16K, FIG. 17K). As depicted in FIG. 15, Vector A (pSS99-1) encodes a TBG-promoter-driven codon-optimized saCas9 with an N-terminal NLS, a C-terminal NLS, and a C-terminal triple Flag tag, followed by a full-length bGH polyA signal. Vector B (pMES06) contains a U6-driven sgRNA1889Z (comprising the targeting domain of SEQ ID NO:706) at the 5′ end of the 1.7kb 5′ homology arm, mutated targeting sequence of sgRNA1889Z (i.e., targeting domain of sgRNA1889Z comprising 10 or more mutations to avoid recognition by sgRNA1889Z), and the 1.7kb 3′ homology arm. Vector C (pMES08) is an alternate version of Vector B that encodes the U6-driven sgRNA1889, a 2.0kb 5′ homology arm, mutated target sequence of sgRNA1889Z (i.e., targeting domain of sgRNA1889Z comprising 10 or more mutations to avoid recognition by sgRNA1889Z), and a 1.4kb 3′ homology arm. As a control, Vector D (pMES02) contains the same donor templates with mutated target and PAM-recognition sequences as in Vector A (pSS99-1) without the U6-gRNA module.

### Example 8: Assessment of Gene Editing in Primary Human Hepatocytes

[1039] Primary human hepatocytes are purchased and maintained per instructions from vendors. Briefly, the cryoplateable human hepatocytes kept in the vapor phase of the liquid nitrogen tank are transferred and thawed in the 37° C. water bath. Once the hepatocytes are thawed, they are re-suspended in plating media and carefully transferred to a conical tube. The cells are then centrifuged at 100×g for 8 minutes at 4° C. and re-suspended again in plating media. Cell density and viability in the suspension is counted and calculated using a hemocytometer. Between 0.7-0.9×10⁶ hepatocytes are plated per well in collagen-treated 24-well plates followed by agitation of the plates at 15 minute intervals for the first one hour. Cultures are maintained in a 37° C. incubator with 5% CO₂. Fresh maintenance media is replaced every 24 hours for the plated hepatocytes to ensure optimum growth conditions.

[1040] To evaluate the activity of saCas9 and gRNA targeting a hSERPINA1 locus, primary hepatocytes are transfected with (1) plasmids encoding saCas9, plasmids encoding sgRNA, and ssODN donor template; (2) mRNA transcript of saCas9, synthetic or in vitro transcribed sgRNA, and ssODN donor template; or (3) ribonucleoprotein complex (RNP) of recombinant Cas9 and gRNA together with ssODN donor template. Five days post transfection, primary hepatocytes are harvested to extract gDNA. T7E1 assay, RFLP assay, and NextGen sequencing are carried out as described above to assess the gene modification frequencies.

[1041] To assess the design and activity of the aforementioned dual-AAV system in modifying Exon V of hSERPINA1, AAV6 vectors were prepared with proviral vectors pSS99-1, pMES02, pMES06, and pMES08. Primary human hepatocytes plated on collagen-treated 24-well plates are transduced with these AAV6 vectors expressing saCas9 and encoding HDR donor template at various Multiplicities of Infection (MOI). Five days post transduction, cells are collected and gDNA from these hepatocytes are extracted to carry out T7E1 assay, RFLP assay, and NextGen sequencing to evaluate the gene modification events.

### Example 9: Assessment of AAV-Mediated HDR in PiZ Transgenic Mice (Approach 1A)

### A Dual-AAV Vector System Introduces Targeted Gene Correction of the Z Mutation on Exon V of SERPINA1 In Vivo

[1042] Natural history studies revealed that liver patients are at high risk of developing lung emphysema in their late 50s or 60s. Currently, there is no reliable treatment for the lung disease associated with AATD and only a small fraction of the lung disease patients are recommended protein replacement therapy to increase their circulating AAT concentration (Sandhaus 2016). As a result, it was hypothesized that targeted gene correction of the Z mutations on SERPINA1 could be beneficial for both liver and lung symptoms simultaneously, providing a one-time treatment.

[1043] To test this hypothesis, a gene editing approach was designed to treat AATD-associated diseases, mediated by a Homology-directed DNA Repair (HDR) for both the liver and lung diseases. Specifically, a dual-vector approach was designed to take advantage of the high frequency HDR induced by AAV vectors in correcting the Z mutations on hSERPINA1 to the wild-type M alleles in PiZ mice. AAV has been previously reported to increase HDR rates in ex vivo systems, including primary T-cells (Wang 2016) and hematopoietic stem cells (HSCs) (Dever 2016; Sather 2015). The single guide RNA, sgRNA-1889Z, which comprises the targeting domain of SEQ ID NO:706, was chosen for the in vivo study as described herein in Example 9. In certain embodiments, other sgRNAs may be used in the dual vector approach provided herein.

[1044] Recombinant AAV vectors packaging proviral vectors pSS99-1, pMES06, and pMES08 were produced and purified as described above in Example 7. As shown in FIG. 20A, these proviral vectors include two types of AAV transgenes. The first AAV vector encodes TBG-driven saCas9 with NLS signals and a triple Flag-tag followed by a full-length bovine growth hormone polyA (bGHpA) tail (see pSS99-1 (i.e., Cas9) (FIG. 16A, FIG. 17A)). The second type of AAV vector delivers U6-driven sgRNA-1889Z (comprising the targeting domain of SEQ ID NO:706) and different HDR donor templates (see pMES06 (FIG. 16J, FIG. 17J) and pMES08 (FIG. 16K, FIG. 17K)). In certain embodiments, other AAV transgenes may be used in the dual vector approach provided herein, including but not limited to, pMES02.

[1045] Two HDR template configurations were tested, both with 10 mutations introduced on the targeting sequence and PAM to avoid re-cutting after DNA repair. AAV8-MES06 delivers homology arms of 1.7 kb in length on either end of the mutated target site; AAV8-MES08 shifted the balance of the homology arms to 60% of sequence on the 5′ end and 40% on the 3′ end relevant to the mutated target site (2.1kb+1.4 kb). It has been shown that an unbalanced design of single-stranded oligonucleotide (ssODN) as donor template could enhance HDR frequencies in cell culture. Thus, it was investigated if the same phenomenon holds true when more extended homology arms are involved.

[1046] The PiZ mice as described in Example 2 were used for the experiments provided herein in Example 9. Briefly, PiZ mice were bred and maintained in an AAALAC-accredited facility at SLU School of Medicine as in Carlson 1989. All procedures were in accordance with the animal protocol approved by the Institutional Animal Care and Use Committee (IACUC) at SLU. Mice homozygous for the human PiZ alleles were bred with C57B6 males (Jackson Laboratories) to obtain heterozygous offspring. All studies were conducted with heterozygous mice. Dosing groups were designed to include at least one PBS control animal in each litter of animals.

[1047] Mixed-gender, heterozygous PiZ mice at age of 5-11 weeks were dosed in four groups: (1) PBS control (6 mice/group), (2) 1.28e14 vg/kg of AAV8-MES06 alone as vehicle control (6 mice/group), (3) 5e13 vg/kg of AAV8-Cas9 on Day 0 and 1.28e14 vg/kg of AAV8-MES06 on Day 1 (9 mice/group), (3) 5e13 vg/kg of AAV8-Cas9 on Day 0 and 1.28e14 vg/kg of AAV8-MES08 on Day 1 (9 mice/group). The dose of AAV8-Cas9 vectors was kept consistent with previous AAV8-Cas9 studies to ensure sufficient Cas9 expressions in the liver. The dose of AAV8-MES06 or AAV8-MES08 was 2.56x of AAV8-Cas9 due to the limiting concentration of viral preparations. On Day 0, PiZ mice were injected with PBS or AAV8-Cas9 vectors. 24 hours later, PiZ mice were injected with PBS, AAV8-MES06, or AAV8-MES08, accordingly. Animals were bled on Days-2, 0 (3 hours prior to dosing), 7, 14, 21, 28, 35, 42, 49, and 56 to collect serum for AAT ELISA. Cohorts of mice from each treatment group were sacrificed on Days 28, 42, and 56 to investigate the kinetics of therapeutic effects in hepatocytes by histology (FIG. 20B). The cohorts of mice sacrificed were as follows: Day 28 (PBS group, 2 mice; AAV8-MES06 group, 2 mice; AAV8-Cas9+AAV8-MES06, 3 mice; AAV8-Cas9+AAV8-MES08, 3 mice); Day 42 (PBS group, 2 mice; AAV8-MES06 group, 2 mice; AAV8-Cas9+AAV8-MES06, 3 mice; AAV8-Cas9+AAV8-MES08, 3 mice); and Day 56 (PBS group, 2 mice; AAV8-MES06 group, 2 mice; AAV8-Cas9+AAV8-MES06, 3 mice; AAV8-Cas9+AAV8-MES08, 3 mice).

[1048] The 3.5kb homology templates delivered by AAV8 impose challenges in amplifying gene loci of interest near the Cas9 cut site. At a dose of 1.28e14 vg/kg, it is estimated to be >500 viral genome/quadruploid hepatocyte immediately after intravenous injections. It is difficult to PCR amplify 500 bp fragments for Illumina sequencing from genomic DNA in the presence of >500 copies of highly homologous sequences. Therefore, in order to analyze genetic modifications near the Z mutation, whole-transcriptome RNAseq of the total RNA extracted from PiZ mouse livers were conducted at Day 56 post injections. Briefly, total RNA was extracted from pulverized liver samples using RNeasy Mini Kits (Qiagen). RNA concentration and integrity were assayed using RNA 600 Nano Kits (Agilent) on a Bioanalyzer (Agilent) to determine an RNA Integrity Number (RIN) greater than 6.5. RNA was treated Turbo DNA-free Kit (Ambion) and reverse-transcribed using Superscript III RT (Invitrogen). RNAseq library preparations and HiSeq runs were conducted at Genewiz. Ribosomal RNA depletion was performed prior to stranded RNA library preparation. Data were analyzed in-house and visualized with Integrative Genomics Viewer (The Broad Institute). With depletions of total DNA prior to reverse transcription, contamination from AAV genomes during analysis of the genomic DNA was avoided. RNAseq revealed that the total hSERPINA1 expression relative to mouse B2M was significantly reduced (by 85%) in mice treated with the dual-AAV vector system (FIG. 20C). SERPINA1 expression decreased by 35% in the AAV8-MES06 control group.

[1049] Next, the specific nucleotide changes on the targeting sequence and PAM in the remaining mRNA of hSERPINA1 were investigated using RNAseq. All ten intended mutations on the donor templates were detected from read alignments. Consistent with previous reports, the highest nucleotide substitution frequency occurred near the cut site at 6% of the total hSERPINA1 transcripts. The nucleotide responsible for the Z-to-M transition (A>C substitution) showed 4.3% correction with AAV8-Cas9+AAV8-MES06, and 4.8% correction with AAV8-Cas9+AAV8-MES08 (FIG. 20D). The rest of the eight mutations occur at frequencies of 3-4%, slightly decreasing the further they are away from the cut site. These results indicate that ˜5% of the AAT transcripts from the PiZ mouse livers are the more active M form of AAT at 56 days post dual-vector injections.

### Amelioration of the Liver Diseases in PiZ Mice by Correcting the Z Mutations on AAT Proteins

[1050] The pharmacological effects of the targeted nucleotide correction of the Z mutation in PiZ transgenic mice were also analyzed. The PiZ mice do not manifest any lung emphysema symptoms due to sufficient mouse AAT expression from the endogenous SERPINA1 loci. Therefore, pulmonary function tests do not provide any insights in this current study. First, a human-specific AAT ELISA was performed to understand the kinetics of effects in terms of circulating AAT. Briefly, blood samples were collected by tail nicking at interval time points and by cardiac puncture at terminal time points. Blood was further processed into serum and kept frozen in −80° C. A human AAT ELISA Kit (ab108799, Abcam) was used to measure the absolute concentrations of human AAT in serum samples from the PiZ transgenic mice. Serum samples were thawed on ice and diluted in supplied assay buffer containing 0.01% naïve C57BL/6 mouse serum. A standard curve was prepared by reconstituting the supplied recombinant AAT as per the supplied protocol to 100 ng/ml and serial dilutions to 0.137 ng/ml. After antibody incubation and exposure steps, the plate was read on an Envision (Perkin Elmer, Santa Clara, CA) at the absorbance of 450 nm. A standard curve was calculated fitted to a 4-parameter sigmoidal curve (Graph Pad Prism, La Jolla CA) using the background corrected Absorbance values for each standard. For each serum sample, the dilution(s) lying in the linear range of the standard curve were extrapolated to generate raw values. The raw values were adjusted by multiplying by the dilution to give the actual value in serum in ng/ml. If there were two values in the linear range, both values were calculated and then averaged.

[1051] Similar to the results using the All-in-One AAV8-CRISPR vectors in Example 2, reduction of serum AAT was detected from Day 5 and stabilized from Day 14. Both dual-vector treatment groups demonstrated more than two-log reduction in the total human AAT content in blood (FIG. 21A). Due to the lack of antibodies specific to AAT-M and the low abundance of the corrected AAT-M in circulation, the percentage of circulating AAT proteins in M or Z form could not be analyzed.

[1052] Consistent with the ELISA results, PAS-D staining of liver sections harvested at Day 56 also demonstrated robust reduction in AAT globules in hepatocytes (FIG. 21B). Briefly, liver tissues were collected, fixed in 10% buffered formalin, embedded in paraffin, and sectioned into 5 um slices. Sections were stained with PAS-D to visualize AAT aggregation in hepatocytes, followed by quantitation of globule counts and total globule area using ImageJ (Rasband W. S., National Institutes of Health, USA). Three random areas were imaged and analyzed for each liver sample. Slides of H&E staining were also imaged to visualize general morphology and AAT aggregates. Quantification of PAS-D staining images (FIGS. 24A-D) revealed that both the globule counts and sizes were reduced by more than 80% on Day 56 post injections (FIGS. 21C& 21D). Interestingly, the total globule counts and sizes increased from Day 28 to 56 in both PBS and single-vector control groups, indicating accumulation of AAT globules in PiZ hepatocytes over time. Together, these molecular and pharmacological results suggest the potential of CRISPR/Cas9-mediated gene correction to simultaneously reduce the toxic protein load in livers and increase active AAT-M content in circulation. As shown herein, the dual-vector AAV8-CRISPR system correcting the Z-mutation on Exon V ameliorated the liver injuries of PiZ mice.

[1053] In this example, two-tailed Student t tests and one-way ANOVA with Bonferroni multiple comparison post-test were performed using Excel and GraphPad Prism 7 (GraphPad, San Diego, CA). Statistical significance was assumed with a p-value <0.05 (*), <0.01 (**), and <0.001 (***). Error bars in the figures represent s.e.m unless noted otherwise.

[1054] In certain embodiments, Cas9 protein expression in liver specimens may be analyzed by Western blotting with an antibody recognizing saCas9. Levels of hSERPINA1 and mSERPINA1 mRNA in liver samples may be quantified by RT-qPCR using species-specific primer pairs. In addition, T7E1 assay and Next Generation Sequencing may be carried out in order to study the gene editing events at the DNA level. In certain embodiments, mice may be injected intravenously with the following combination of AAV vectors carrying saCas9, gRNA, and HDR template: (1) AAV-SS99-1 (2×10¹¹ μg/mouse); (2) AAV-MES06 (8×10¹ μg/mouse); (3) AAV-SS99-1 (2×10¹¹ μg/mouse) and AAV-MES02 (8×10¹¹ μg/mouse); (4) AAV-SS99-1 (2×10¹¹ μg/mouse) and AAV-MES06 (8×10¹¹ μg/mouse); or (5) AAV-SS99-1 (2×10¹¹ μg/mouse) and AAV-MES08 (8×10¹¹ μg/mouse).

### INCORPORATION BY REFERENCE

[1055] All publications, patents, and patent applications mentioned herein are hereby incorporated by reference in their entirety as if each individual publication, patent or patent application was specifically and individually indicated to be incorporated by reference. In case of conflict, the present application, including any definitions herein, will control.

### EQUIVALENTS

[1056] Those skilled in the art will recognize, or be able to ascertain using no more than routine experimentation, many equivalents to the specific embodiments of the invention described herein. Such equivalents are intended to be encompassed by the following claims.

### REFERENCES

[1057] Alam et al. Am J Respir Crit Care Med 189(8):909-931 (2014)
[1058] An et al. Hepatology 41(1):160-167 (2005)
[1059] Anders et al. Nature 513(7519):569-573 (2014)
[1060] Bae et al. Bioinformatics 30(10):1473-1475 (2014)
[1061] Barretina et al. Nature 483(7391):603-607 (2012)
[1062] Sandhaus et al. Chronic Obstr Pulm Dis 3(3)668-682 (2016)
[1063] Sather et al. Sci Trans Med. 7(307):307ra156 (2015)
[1064] Caldecott Nat Rev Genet 9(8):619-631 (2008)
[1065] Carlson et al. J Clin Invest 83(4):1183-1190 (1989)
[1066] Chylinski et al. RNA Biol 10(5):726-737 (2013)
[1067] Cong et al. Science 399(6121):819-823 (2013)
[1068] Cotta-Ramusino et al. WO 2016/073990 (2016)
[1069] Deveau et al. J Bacterial 190(4):1390-1400 (2008)
[1070] Dever et al. Nature 539(7629):384-389 (2016)
[1071] Esvelt et al. Nature 472(7344):499-503 (2011)
[1072] Fine et al. Sci Rep. 5:10777 (2015)
[1073] Friedland et al. Genome Biology 16(257):1-10 (2015)
[1074] Fu et al. Nat Biotechnol 32:279-284 (2014)
[1075] Grieger et al. Nat Protoc 1(3):1412-1428 (2006)
[1076] Guilinger et al. Nat Biotechnol 32:577-582 (2014)
[1077] Haft PLoS Comput Biol 1(6):e60 (2005)
[1078] Heigwer Nat Methods 11(2):122-123 (2014)
[1079] Horvath & Barrangou Science 327(5962):167-170 (2010)
[1080] Hsu et al. Nat Biotechnol 31(9):827-832 (2013)
[1081] Jinek et al. Science 337(6096):816-821 (2012)
[1082] Jinek et al. Science 343(6176):1247997 (2014)
[1083] Kleinstiver et al. Nature 523(7561):481-485 (2015a)
[1084] Kleinstiver et al. Nat Biotechnol 33(12):1293-1298 (2015b)
[1085] Kleinstiver et al. Nature 529(7587):490-495 (2016)
[1086] Lee et al. Nano Lett 12(12):6322-6327 (2012)
[1087] Li Cell Res 18(1):85-98 (2008)
[1088] Lindblad et al. Hepatology 46(4):1228-1235 (2007)
[1089] Makarova et al. Nat Rev Microbiol 9(6):467-477 (2011)
[1090] Mali et al. Science 339(6121):823-826 (2013)
[1091] Marteijn et al. Nat Rev Mol Cell Biol 15(7):465-481 (2014)
[1092] Momex et al. J Clin Invest 77(6):1952-1961 (1986)
[1093] Mulgrew et al. Chest 125(5):1952-1957 (2004)
[1094] Nishimasu et al. Cell 156(5):935-949 (2014)
[1095] Ran et al. Cell 154(6):1380-1389 (2013)
[1096] Sharma et al. Blood 126(15):1777-1784 (2015)
[1097] Shmakov et al. Molecular Cell 60(3):385-397 (2015)
[1098] Sifers et al. Nucleic Acids Res 15(4):1459-1475 (1987)
[1099] Sternberg et al. Nature 507(7490):62-67 (2014)
[1100] Sveger Acta Paediatr Scand 77(6):847-851 (1988)
[1101] Volpert et al. J Pediatr Gastroenterol Nutr 31(3):258-263 (2000)
[1102] Wang et al. Cell 153(4):910-918 (2013)
[1103] Wang et al. Nature Biotechnol 33(12):1256-1263 (2015)
[1104] Wang et al. Nucleic Acids Research 44(3):e30 (2016)
[1105] Xiao et al. “CasOT: a genome-wide Cas9/gRNA off-target searching tool. Bioinformatics (epub Jan. 21, 2014)
[1106] Yamano et al. Cell 165(4): 949-962 (2016)
[1107] Zetsche et al. Nat Biotechnol 33(2):139-42 (2015)

The application's sequence listing, which the Patent Office published only in electronic form, follows.

SEQUENCE LISTING (2231 sequences)

SEQ ID NO: 1 - protein, 1345 aa, Streptococcus mutans
  REGION 10..21: note = misc_feature - N-terminal RuvC-like domain
  REGION 759..766: note = misc_feature - RuvC-like domain
  REGION 837..863: note = misc_feature - HNH-like domain
  REGION 982..989: note = misc_feature - RuvC-like domain
MKKPYSIGLDIGTNSVGWAVVTDDYKVPAKKMKVLGNTDKSHIEKNLLGALLFDSGNTAEDRRLKRTARRRYTRRRNRILYLQEIFSEEMGKVDDSFFHRLEDSFLVTEDKRGERHPIFGNLEEEVKYHENFPTIYHLRQYLADNPEKVDLRLVYLALAHIIKFRGHFLIEGKFDTRNNDVQRLFQEFLAVYDNTFENSSLQEQNVQVEEILTDKISKSAKKDRVLKLFPNEKSNGRFAEFLKLIVGNQADFKKHFELEEKAPLQFSKDTYEEELEVLLAQIGDNYAELFLSAKKLYDSILLSGILTVTDVGTKAPLSASMIQRYNEHQMDLAQLKQFIRQKLSDKYNEVFSDVSKDGYAGYIDGKTNQEAFYKYLKGLLNKIEGSGYFLDKIEREDFLRKQRTFDNGSIPHQIHLQEMRAIIRRQAEFYPFLADNQDRIEKLLTFRIPYYVGPLARGKSDFAWLSRKSADKITPWNFDEIVDKESSAEAFINRMTNYDLYLPNQKVLPKHSLLYEKFTVYNELTKVKYKTEQGKTAFFDANMKQEIFDGVFKVYRKVTKDKLMDFLEKEFDEFRIVDLTGLDKENKVFNASYGTYHDLCKILDKDFLDNSKNEKILEDIVLTLTLFEDREMIRKRLENYSDLLTKEQVKKLERRHYTGWGRLSAELIHGIRNKESRKTILDYLIDDGNSNRNFMQLINDDALSFKEEIAKAQVIGETDNLNQVVSDIAGSPAIKKGILQSLKIVDELVKIMGHQPENIVVEMARENQFTNQGRRNSQQRLKGLTDSIKEFGSQILKEHPVENSQLQNDRLFLYYLQNGRDMYTGEELDIDYLSQYDIDHIIPQAFIKDNSIDNRVLTSSKENRGKSDDVPSKDVVRKMKSYWSKLLSAKLITQRKFDNLTKAERGGLTDDDKAGFIKRQLVETRQITKHVARILDERFNTETDENNKKIRQVKIVTLKSNLVSNFRKEFELYKVREINDYHHAHDAYLNAVIGKALLGVYPQLEPEFVYGDYPHFHGHKENKATAKKFFYSNIMNFFKKDDVRTDKNGEIIWKKDEHISNIKKVLSYPQVNIVKKVEEQTGGFSKESILPKGNSDKLIPRKTKKFYWDTKKYGGFDSPIVAYSILVIADIEKGKSKKLKTVKALVGVTIMEKMTFERDPVAFLERKGYRNVQEENIIKLPKYSLFKLENGRKRLLASARELQKGNEIVLPNHLGTLLYHAKNIHKVDEPKHLDYVDKHKDEFKELLDVVSNFSKKYTLAEGNLEKIKELYAQNNGEDLKELASSFINLLTFTAIGAPATFKFFDKNIDRKRYTSTTEILNATLIHQSITGLYETRIDLNKLGGD

SEQ ID NO: 2 - protein, 1368 aa, Streptococcus pyogenes [sequence omitted]

SEQ ID NO: 3 - DNA, 4107 bp, Streptococcus pyogenes
  source 1..4107: mol_type = other DNA
atggataaaaagtacagcatcgggctggacatcggtacaaactcagtggggtgggccgtgattacggacgagtacaaggtaccctccaaaaaatttaaagtgctgggtaacacggacagacactctataaagaaaaatcttattggagccttgctgttcgactcaggcgagacagccgaagccacaaggttgaagcggaccgccaggaggcggtataccaggagaaagaaccgcatatgctacctgcaagaaatcttcagtaacgagatggcaaaggttgacgatagctttttccatcgcctggaagaatcctttcttgttgaggaagacaagaagcacgaacggcaccccatctttggcaatattgtcgacgaagtggcatatcacgaaaagtacccgactatctaccacctcaggaagaagctggtggactctaccgataaggcggacctcagacttatttatttggcactcgcccacatgattaaatttagaggacatttcttgatcgagggcgacctgaacccggacaacagtgacgtcgataagctgttcatccaacttgtgcagacctacaatcaactgttcgaagaaaaccctataaatgcttcaggagtcgacgctaaagcaatcctgtccgcgcgcctctcaaaatctagaagacttgagaatctgattgctcagttgcccggggaaaagaaaaatggattgtttggcaacctgatcgccctcagtctcggactgaccccaaatttcaaaagtaacttcgacctggccgaagacgctaagctccagctgtccaaggacacatacgatgacgacctcgacaatctgctggcccagattggggatcagtacgccgatctctttttggcagcaaagaacctgtccgacgccatcctgttgagcgatatcttgagagtgaacaccgaaattactaaagcaccccttagcgcatctatgatcaagcggtacgacgagcatcatcaggatctgaccctgctgaaggctcttgtgaggcaacagctccccgaaaaatacaaggaaatcttctttgaccagagcaaaaacggctacgctggctatatagatggtggggccagtcaggaggaattctataaattcatcaagcccattctcgagaaaatggacggcacagaggagttgctggtcaaacttaacagggaggacctgctgcggaagcagcggacctttgacaacgggtctatcccccaccagattcatctgggcgaactgcacgcaatcctgaggaggcaggaggatttttatccttttcttaaagataaccgcgagaaaatagaaaagattcttacattcaggatcccgtactacgtgggacctctcgcccggggcaattcacggtttgcctggatgacaaggaagtcagaggagactattacaccttggaacttcgaagaagtggtggacaagggtgcatctgcccagtctttcatcgagcggatgacaaattttgacaagaacctccctaatgagaaggtgctgcccaaacattctctgctctacgagtactttaccgtctacaatgaactgactaaagtcaagtacgtcaccgagggaatgaggaagccggcattccttagtggagaacagaagaaggcgattgtagacctgttgttcaagaccaacaggaaggtgactgtgaagcaacttaaagaagactactttaagaagatcgaatgttttgacagtgtggaaatttcaggggttgaagaccgcttcaatgcgtcattggggacttaccatgatcttctcaagatcataaaggacaaagacttcctggacaacgaagaaaatgaggatattctcgaagacatcgtcctcaccctgaccctgttcgaagacagggaaatgatagaagagcgcttgaaaacctatgcccacctcttcgacgataaagttatgaagcagctgaagcgcaggagatacacaggatggggaagattgtcaaggaagctgatcaatggaattagggataaacagagtggcaagaccatactggatttcctcaaatctgatggcttcgccaataggaacttcatgcaactgattcacgatgactctcttaccttcaaggaggacattcaaaaggctcaggtgagcgggcagggagactcccttcatgaacacatcgcgaatttggcaggttcccccgctattaaaaagggcatccttcaaactgtcaaggtggtggatgaattggtcaaggtaatgggcagacataagccagaaaatattgtgatcgagatggcccgcgaaaaccagaccacacagaagggccagaaaaatagtagagagcggatgaagaggatcgaggagggcatcaaagagctgggatctcagattctcaaagaacaccccgtagaaaacacacagctgcagaacgaaaaattgtacttgtactatctgcagaacggcagagacatgtacgtcgaccaagaacttgatattaatagactgtccgactatgacgtagaccatatcgtgccccagtccttcctgaaggacgactccattgataacaaagtcttgacaagaagcgacaagaacaggggtaaaagtgataatgtgcctagcgaggaggtggtgaaaaaaatgaagaactactggcgacagctgcttaatgcaaagctcattacacaacggaagttcgataatctgacgaaagcagagagaggtggcttgtctgagttggacaaggcagggtttattaagcggcagctggtggaaactaggcagatcacaaagcacgtggcgcagattttggacagccggatgaacacaaaatacgacgaaaatgataaactgatacgagaggtcaaagttatcacgctgaaaagcaagctggtgtccgattttcggaaagacttccagttctacaaagttcgcgagattaataactaccatcatgctcacgatgcgtacctgaacgctgttgtcgggaccgccttgataaagaagtacccaaagctggaatccgagttcgtatacggggattacaaagtgtacgatgtgaggaaaatgatagccaagtccgagcaggagattggaaaggccacagctaagtacttcttttattctaacatcatgaatttttttaagacggaaattaccctggccaacggagagatcagaaagcggccccttatagagacaaatggtgaaacaggtgaaatcgtctgggataagggcagggatttcgctactgtgaggaaggtgctgagtatgccacaggtaaatatcgtgaaaaaaaccgaagtacagaccggaggattttccaaggaaagcattttgcctaaaagaaactcagacaagctcatcgcccgcaagaaagattgggaccctaagaaatacgggggatttgactcacccaccgtagcctattctgtgctggtggtagctaaggtggaaaaaggaaagtctaagaagctgaagtccgtgaaggaactcttgggaatcactatcatggaaagatcatcctttgaaaagaaccctatcgatttcctggaggctaagggttacaaggaggtcaagaaagacctcatcattaaactgccaaaatactctctcttcgagctggaaaatggcaggaagagaatgttggccagcgccggagagctgcaaaagggaaacgagcttgctctgccctccaaatatgttaattttctctatctcgcttcccactatgaaaagctgaaagggtctcccgaagataacgagcagaagcagctgttcgtcgaacagcacaagcactatctggatgaaataatcgaacaaataagcgagttcagcaaaagggttatcctggcggatgctaatttggacaaagtactgtctgcttataacaagcaccgggataagcctattagggaacaagccgagaatataattcacctctttacactcacgaatctcggagcccccgccgccttcaaatactttgatacgactatcgaccggaaacggtataccagtaccaaagaggtcctcgatgccaccctcatccaccagtcaattactggcctgtacgaaacacggatcgacctctctcaactgggcggcgactag

SEQ ID NO: 4 - protein, 1388 aa, Streptococcus thermophilus
  REGION 10..21: note = misc_feature - N-terminal RuvC-like domain
  REGION 760..767: note = misc_feature - RuvC-like domain
  REGION 844..870: note = misc_feature - HNH-like domain
  REGION 989..996: note = misc_feature - RuvC-like domain
MTKPYSIGLDIGTNSVGWAVTTDNYKVPSKKMKVLGNTSKKYIKKNLLGVLLFDSGITAEGRRLKRTARRRYTRRRNRILYLQEIFSTEMATLDDAFFQRLDDSFLVPDDKRDSKYPIFGNLVEEKAYHDEFPTIYHLRKYLADSTKKADLRLVYLALAHMIKYRGHFLIEGEFNSKNNDIQKNFQDFLDTYNAIFESDLSLENSKQLEEIVKDKISKLEKKDRILKLFPGEKNSGIFSEFLKLIVGNQADFRKCFNLDEKASLHFSKESYDEDLETLLGYIGDDYSDVFLKAKKLYDAILLSGFLTVTDNETEAPLSSAMIKRYNEHKEDLALLKEYIRNISLKTYNEVFKDDTKNGYAGYIDGKTNQEDFYVYLKKLLAEFEGADYFLEKIDREDFLRKQRTFDNGSIPYQIHLQEMRAILDKQAKFYPFLAKNKERIEKILTFRIPYYVGPLARGNSDFAWSIRKRNEKITPWNFEDVIDKESSAEAFINRMTSFDLYLPEEKVLPKHSLLYETFNVYNELTKVRFIAESMRDYQFLDSKQKKDIVRLYFKDKRKVTDKDIIEYLHAIYGYDGIELKGIEKQFNSSLSTYHDLLNIINDKEFLDDSSNEAIIEEIIHTLTIFEDREMIKQRLSKFENIFDKSVLKKLSRRHYTGWGKLSAKLINGIRDEKSGNTILDYLIDDGISNRNFMQLIHDDALSFKKKIQKAQIIGDEDKGNIKEVVKSLPGSPAIKKGILQSIKIVDELVKVMGGRKPESIVVEMARENQYTNQGKSNSQQRLKRLEKSLKELGSKILKENIPAKLSKIDNNALQNDRLYLYYLQNGKDMYTGDDLDIDRLSNYDIDHIIPQAFLKDNSIDNKVLVSSASNRGKSDDVPSLEVVKKRKTFWYQLLKSKLISQRKFDNLTKAERGGLSPEDKAGFIQRQLVETRQITKHVARLLDEKFNNKKDENNRAVRTVKIITLKSTLVSQFRKDFELYKVREINDFHHAHDAYLNAVVASALLKKYPKLEPEFVYGDYPKYNSFRERKSATEKVYFYSNIMNIFKKSISLADGRVIERPLIEVNEETGESVWNKESDLATVRRVLSYPQVNVVKKVEEQNHGLDRGKPKGLFNANLSSKPKPNSNENLVGAKEYLDPKKYGGYAGISNSFTVLVKGTIEKGAKKKITNVLEFQGISILDRINYRKDKLNFLLEKGYKDIELIIELPKYSLFELSDGSRRMLASILSTNNKRGEIHKGNQIFLSQKFVKLLYHAKRISNTINENHRKYVENHKKEFEELFYYILEFNENYVGAKKNGKLLNSAFQSWQNHSIDELCSSFIGPTGSERKGLFELTSRGSAADFEFLGVKIPRYRDYTPSSLLKDATLIHQSVTGLYETRIDLAKLGEG

SEQ ID NO: 5 - protein, 1334 aa, Listeria innocua
  REGION 10..21: note = misc_feature - N-terminal RuvC-like domain
  REGION 762..769: note = misc_feature - RuvC-like domain
  REGION 840..866: note = misc_feature - HNH-like domain
  REGION 985..992: note = misc_feature - RuvC-like domain
MKKPYTIGLDIGTNSVGWAVLTDQYDLVKRKMKIAGDSEKKQIKKNFWGVRLFDEGQTAADRRMARTARRRIERRRNRISYLQGIFAEEMSKTDANFFCRLSDSFYVDNEKRNSRHPFFATIEEEVEYHKNYPTIYHLREELVNSSEKADLRLVYLALAHIIKYRGNFLIEGALDTQNTSVDGIYKQFIQTYNQVFASGIEDGSLKKLEDNKDVAKILVEKVTRKEKLERILKLYPGEKSAGMFAQFISLIVGSKGNFQKPFDLIEKSDIECAKDSYEEDLESLLALIGDEYAELFVAAKNAYSAVVLSSIITVAETETNAKLSASMIERFDTHEEDLGELKAFIKLHLPKHYEEIFSNTEKHGYAGYIDGKTKQADFYKYMKMTLENIEGADYFIAKIEKENFLRKQRTFDNGAIPHQLHLEELEAILHQQAKYYPFLKENYDKIKSLVTFRIPYFVGPLANGQSEFAWLTRKADGEIRPWNIEEKVDFGKSAVDFIEKMTNKDTYLPKENVLPKHSLCYQKYLVYNELTKVRYINDQGKTSYFSGQEKEQIFNDLFKQKRKVKKKDLELFLRNMSHVESPTIEGLEDSFNSSYSTYHDLLKVGIKQEILDNPVNTEMLENIVKILTVFEDKRMIKEQLQQFSDVLDGVVLKKLERRHYTGWGRLSAKLLMGIRDKQSHLTILDYLMNDDGLNRNLMQLINDSNLSFKSIIEKEQVTTADKDIQSIVADLAGSPAIKKGILQSLKIVDELVSVMGYPPQTIVVEMARENQTTGKGKNNSRPRYKSLEKAIKEFGSQILKEHPTDNQELRNNRLYLYYLQNGKDMYTGQDLDIHNLSNYDIDHIVPQSFITDNSIDNLVLTSSAGNREKGDDVPPLEIVRKRKVFWEKLYQGNLMSKRKFDYLTKAERGGLTEADKARFIHRQLVETRQITKNVANILHQRFNYEKDDHGNTMKQVRIVTLKSALVSQFRKQFQLYKVRDVNDYHHAHDAYLNGVVANTLLKVYPQLEPEFVYGDYHQFDWFKANKATAKKQFYTNIMLFFAQKDRIIDENGEILWDKKYLDTVKKVMSYRQMNIVKKTEIQKGEFSKATIKPKGNSSKLIPRKTNWDPMKYGGLDSPNMAYAVVIEYAKGKNKLVFEKKIIRVTIMERKAFEKDEKAFLEEQGYRQPKVLAKLPKYTLYECEEGRRRMLASANEAQKGNQQVLPNHLVTLLHHAANCEVSDGKSLDYIESNREMFAELLAHVSEFAKRYTLAEANLNKINQLFEQNKEGDIKAIAQSFVDLMAFNAMGAPASFKFFETTIERKRYNNLKELLNSTIIYQSITGLYESRKRLDD

SEQ ID NO: 6 - protein, 1053 aa, Staphylococcus aureus
MKRNYILGLDIGITSVGYGIIDYETRDVIDAGVRLFKEANVENNEGRRSKRGARRLKRRRRHRIQRVKKLLFDYNLLTDHSELSGINPYEARVKGLSQKLSEEEFSAALLHLAKRRGVHNVNEVEEDTGNELSTKEQISRNSKALEEKYVAELQLERLKKDGEVRGSINRFKTSDYVKEAKQLLKVQKAYHQLDQSFIDTYIDLLETRRTYYEGPGEGSPFGWKDIKEWYEMLMGHCTYFPEELRSVKYAYNADLYNALNDLNNLVITRDENEKLEYYEKFQIIENVFKQKKKPTLKQIAKEILVNEEDIKGYRVTSTGKPEFTNLKVYHDIKDITARKEIIENAELLDQIAKILTIYQSSEDIQEELTNLNSELTQEEIEQISNLKGYTGTHNLSLKAINLILDELWHTNDNQIAIFNRLKLVPKKVDLSQQKEIPTTLVDDFILSPVVKRSFIQSIKVINAIIKKYGLPNDIIIELAREKNSKDAQKMINEMQKRNRQTNERIEEIIRTTGKENAKYLIEKIKLHDMQEGKCLYSLEAIPLEDLLNNPFNYEVDHIIPRSVSFDNSFNNKVLVKQEENSKKGNRTPFQYLSSSDSKISYETFKKHILNLAKGKGRISKTKKEYLLEERDINRFSVQKDFINRNLVDTRYATRGLMNLLRSYFRVNNLDVKVKSINGGFTSFLRRKWKFKKERNKGYKHHAEDALIIANADFIFKEWKKLDKAKKVMENQMFEEKQAESMPEIETEQEYKEIFITPHQIKHIKDFKDYKYSHRVDKKPNRELINDTLYSTRKDDKGNTLIVNNLNGLYDKDNDKLKKLINKSPEKLLMYHHDPQTYQKLKLIMEQYGDEKNPLYKYYEETGNYLTKYSKKDNGPVIKKIKYYGNKLNAHLDITDDYPNSRNKVVKLSLKPYRFDVYLDNGVYKFVTVKNLDVIKKENYYEVNSKCYEEAKKLKKISNQAEFIASFYNNDLIKINGELYRVIGVNNDLLNRIEVNMIDITYREYLENMNDKRPPRIIKTIASKTQSIKKYSTDILGNLYEVKSKKHPQIIKKG

SEQ ID NO: 7 - DNA, 3159 bp, Staphylococcus aureus
  source 1..3159: mol_type = other DNA
atgaaaaggaactacattctggggctggacatcgggattacaagcgtggggtatgggattattgactatgaaacaagggacgtgatcgacgcaggcgtcagactgttcaaggaggccaacgtggaaaacaatgagggacggagaagcaagaggggagccaggcgcctgaaacgacggagaaggcacagaatccagagggtgaagaaactgctgttcgattacaacctgctgaccgaccattctgagctgagtggaattaatccttatgaagccagggtgaaaggcctgagtcagaagctgtcagaggaagagttttccgcagctctgctgcacctggctaagcgccgaggagtgcataacgtcaatgaggtggaagaggacaccggcaacgagctgtctacaaaggaacagatctcacgcaatagcaaagctctggaagagaagtatgtcgcagagctgcagctggaacggctgaagaaagatggcgaggtgagagggtcaattaataggttcaagacaagcgactacgtcaaagaagccaagcagctgctgaaagtgcagaaggcttaccaccagctggatcagagcttcatcgatacttatatcgacctgctggagactcggagaacctactatgagggaccaggagaagggagccccttcggatggaaagacatcaaggaatggtacgagatgctgatgggacattgcacctattttccagaagagctgagaagcgtcaagtacgcttataacgcagatctgtacaacgccctgaatgacctgaacaacctggtcatcaccagggatgaaaacgagaaactggaatactatgagaagttccagatcatcgaaaacgtgtttaagcagaagaaaaagcctacactgaaacagattgctaaggagatcctggtcaacgaagaggacatcaagggctaccgggtgacaagcactggaaaaccagagttcaccaatctgaaagtgtatcacgatattaaggacatcacagcacggaaagaaatcattgagaacgccgaactgctggatcagattgctaagatcctgactatctaccagagctccgaggacatccaggaagagctgactaacctgaacagcgagctgacccaggaagagatcgaacagattagtaatctgaaggggtacaccggaacacacaacctgtccctgaaagctatcaatctgattctggatgagctgtggcatacaaacgacaatcagattgcaatctttaaccggctgaagctggtcccaaaaaaggtggacctgagtcagcagaaagagatcccaaccacactggtggacgatttcattctgtcacccgtggtcaagcggagcttcatccagagcatcaaagtgatcaacgccatcatcaagaagtacggcctgcccaatgatatcattatcgagctggctagggagaagaacagcaaggacgcacagaagatgatcaatgagatgcagaaacgaaaccggcagaccaatgaacgcattgaagagattatccgaactaccgggaaagagaacgcaaagtacctgattgaaaaaatcaagctgcacgatatgcaggagggaaagtgtctgtattctctggaggccatccccctggaggacctgctgaacaatccattcaactacgaggtcgatcatattatccccagaagcgtgtccttcgacaattcctttaacaacaaggtgctggtcaagcaggaagagaactctaaaaagggcaataggactcctttccagtacctgtctagttcagattccaagatctcttacgaaacctttaaaaagcacattctgaatctggccaaaggaaagggccgcatcagcaagaccaaaaaggagtacctgctggaagagcgggacatcaacagattctccgtccagaaggattttattaaccggaatctggtggacacaagatacgctactcgcggcctgatgaatctgctgcgatcctatttccgggtgaacaatctggatgtgaaagtcaagtccatcaacggcgggttcacatcttttctgaggcgcaaatggaagtttaaaaaggagcgcaacaaagggtacaagcaccatgccgaagatgctctgattatcgcaaatgccgacttcatctttaaggagtggaaaaagctggacaaagccaagaaagtgatggagaaccagatgttcgaagagaagcaggccgaatctatgcccgaaatcgagacagaacaggagtacaaggagattttcatcactcctcaccagatcaagcatatcaaggatttcaaggactacaagtactctcaccgggtggataaaaagcccaacagagagctgatcaatgacaccctgtatagtacaagaaaagacgataaggggaataccctgattgtgaacaatctgaacggactgtacgacaaagataatgacaagctgaaaaagctgatcaacaaaagtcccgagaagctgctgatgtaccaccatgatcctcagacatatcagaaactgaagctgattatggagcagtacggcgacgagaagaacccactgtataagtactatgaagagactgggaactacctgaccaagtatagcaaaaaggataatggccccgtgatcaagaagatcaagtactatgggaacaagctgaatgcccatctggacatcacagacgattaccctaacagtcgcaacaaggtggtcaagctgtcactgaagccatacagattcgatgtctatctggacaacggcgtgtataaatttgtgactgtcaagaatctggatgtcatcaaaaaggagaactactatgaagtgaatagcaagtgctacgaagaggctaaaaagctgaaaaagattagcaaccaggcagagttcatcgcctccttttacaacaacgacctgattaagatcaatggcgaactgtatagggtcatcggggtgaacaatgatctgctgaaccgcattgaagtgaatatgattgacatcacttaccgagagtatctggaaaacatgaatgataagcgcccccctcgaattatcaaaacaattgcctctaagactcagagtatcaaaaagtactcaaccgacattctgggaaacctgtatgaggtgaagagcaaaaagcaccctcagattatcaaaaagggc

SEQ ID NO: 8 - DNA, 3159 bp, Staphylococcus aureus
  source 1..3159: mol_type = other DNA
atgaagcggaactacatcctgggcctggacatcggcatcaccagcgtgggctacggcatcatcgactacgagacacgggacgtgatcgatgccggcgtgcggctgttcaaagaggccaacgtggaaaacaacgagggcaggcggagcaagagaggcgccagaaggctgaagcggcggaggcggcatagaatccagagagtgaagaagctgctgttcgactacaacctgctgaccgaccacagcgagctgagcggcatcaacccctacgaggccagagtgaagggcctgagccagaagctgagcgaggaagagttctctgccgccctgctgcacctggccaagagaagaggcgtgcacaacgtgaacgaggtggaagaggacaccggcaacgagctgtccaccaaagagcagatcagccggaacagcaaggccctggaagagaaatacgtggccgaactgcagctggaacggctgaagaaagacggcgaagtgcggggcagcatcaacagattcaagaccagcgactacgtgaaagaagccaaacagctgctgaaggtgcagaaggcctaccaccagctggaccagagcttcatcgacacctacatcgacctgctggaaacccggcggacctactatgagggacctggcgagggcagccccttcggctggaaggacatcaaagaatggtacgagatgctgatgggccactgcacctacttccccgaggaactgcggagcgtgaagtacgcctacaacgccgacctgtacaacgccctgaacgacctgaacaatctcgtgatcaccagggacgagaacgagaagctggaatattacgagaagttccagatcatcgagaacgtgttcaagcagaagaagaagcccaccctgaagcagatcgccaaagaaatcctcgtgaacgaagaggatattaagggctacagagtgaccagcaccggcaagcccgagttcaccaacctgaaggtgtaccacgacatcaaggacattaccgcccggaaagagattattgagaacgccgagctgctggatcagattgccaagatcctgaccatctaccagagcagcgaggacatccaggaagaactgaccaatctgaactccgagctgacccaggaagagatcgagcagatctctaatctgaagggctataccggcacccacaacctgagcctgaaggccatcaacctgatcctggacgagctgtggcacaccaacgacaaccagatcgctatcttcaaccggctgaagctggtgcccaagaaggtggacctgtcccagcagaaagagatccccaccaccctggtggacgacttcatcctgagccccgtcgtgaagagaagcttcatccagagcatcaaagtgatcaacgccatcatcaagaagtacggcctgcccaacgacatcattatcgagctggcccgcgagaagaactccaaggacgcccagaaaatgatcaacgagatgcagaagcggaaccggcagaccaacgagcggatcgaggaaatcatccggaccaccggcaaagagaacgccaagtacctgatcgagaagatcaagctgcacgacatgcaggaaggcaagtgcctgtacagcctggaagccatccctctggaagatctgctgaacaaccccttcaactatgaggtggaccacatcatccccagaagcgtgtccttcgacaacagcttcaacaacaaggtgctcgtgaagcaggaagaaaacagcaagaagggcaaccggaccccattccagtacctgagcagcagcgacagcaagatcagctacgaaaccttcaagaagcacatcctgaatctggccaagggcaagggcagaatcagcaagaccaagaaagagtatctgctggaagaacgggacatcaacaggttctccgtgcagaaagacttcatcaaccggaacctggtggataccagatacgccaccagaggcctgatgaacctgctgcggagctacttcagagtgaacaacctggacgtgaaagtgaagtccatcaatggcggcttcaccagctttctgcggcggaagtggaagtttaagaaagagcggaacaaggggtacaagcaccacgccgaggacgccctgatcattgccaacgccgatttcatcttcaaagagtggaagaaactggacaaggccaaaaaagtgatggaaaaccagatgttcgaggaaaagcaggccgagagcatgcccgagatcgaaaccgagcaggagtacaaagagatcttcatcaccccccaccagatcaagcacattaaggacttcaaggactacaagtacagccaccgggtggacaagaagcctaatagagagctgattaacgacaccctgtactccacccggaaggacgacaagggcaacaccctgatcgtgaacaatctgaacggcctgtacgacaaggacaatgacaagctgaaaaagctgatcaacaagagccccgaaaagctgctgatgtaccaccacgacccccagacctaccagaaactgaagctgattatggaacagtacggcgacgagaagaatcccctgtacaagtactacgaggaaaccgggaactacctgaccaagtactccaaaaaggacaacggccccgtgatcaagaagattaagtattacggcaacaaactgaacgcccatctggacatcaccgacgactaccccaacagcagaaacaaggtcgtgaagctgtccctgaagccctacagattcgacgtgtacctggacaatggcgtgtacaagttcgtgaccgtgaagaatctggatgtgatcaaaaaagaaaactactacgaagtgaatagcaagtgctatgaggaagctaagaagctgaagaagatcagcaaccaggccgagtttatcgcctccttctacaacaacgatctgatcaagatcaacggcgagctgtatagagtgatcggcgtgaacaacgacctgctgaaccggatcgaagtgaacatgatcgacatcacctaccgcgagtacctggaaaacatgaacgacaagaggccccccaggatcattaagacaatcgcctccaagacccagagcattaagaagtacagcacagacattctgggcaacctgtatgaagtgaaatctaagaagcaccctcagatcatcaaaaagggc

SEQ ID NO: 9 - DNA, 3159 bp, Staphylococcus aureus
  source 1..3159: mol_type = other DNA
atgaagcgcaactacatcctcggactggacatcggcattacctccgtgggatacggcatcatcgattacgaaactagggatgtgatcgacgctggagtcaggctgttcaaagaggcgaacgtggagaacaacgaggggcggcgctcaaagaggggggcccgccggctgaagcgccgccgcagacatagaatccagcgcgtgaagaagctgctgttcgactacaaccttctgaccgaccactccgaactttccggcatcaacccatatgaggctagagtgaagggattgtcccaaaagctgtccgaggaagagttctccgccgcgttgctccacctcgccaagcgcaggggagtgcacaatgtgaacgaagtggaagaagataccggaaacgagctgtccaccaaggagcagatcagccggaactccaaggccctggaagagaaatacgtggcggaactgcaactggagcggctgaagaaagacggagaagtgcgcggctcgatcaaccgcttcaagacctcggactacgtgaaggaggccaagcagctcctgaaagtgcaaaaggcctatcaccaacttgaccagtcctttatcgatacctacatcgatctgctcgagactcggcggacttactacgagggtccaggggagggctccccatttggttggaaggatattaaggagtggtacgaaatgctgatgggacactgcacatacttccctgaggagctgcggagcgtgaaatacgcatacaacgcagacctgtacaacgcgctgaacgacctgaacaatctcgtgatcacccgggacgagaacgaaaagctcgagtattacgaaaagttccagattattgagaacgtgttcaaacagaagaagaagccgacactgaagcagattgccaaggaaatcctcgtgaacgaagaggacatcaagggctatcgagtgacctcaacgggaaagccggagttcaccaatctgaaggtctaccacgacatcaaagacattaccgcccggaaggagatcattgagaacgcggagctgttggaccagattgcgaagattctgaccatctaccaatcctccgaggatattcaggaagaactcaccaacctcaacagcgaactgacccaggaggagatagagcaaatctccaacctgaagggctacaccggaactcataacctgagcctgaaggccatcaacttgatcctggacgagctgtggcacaccaacgataaccagatcgctattttcaatcggctgaagctggtccccaagaaagtggacctctcacaacaaaaggagatccctactacccttgtggacgatttcattctgtcccccgtggtcaagagaagcttcatacagtcaatcaaagtgatcaatgccattatcaagaaatacggtctgcccaacgacattatcattgagctcgcccgcgagaagaactcgaaggacgcccagaagatgattaacgaaatgcagaagaggaaccgacagactaacgaacggatcgaagaaatcatccggaccaccgggaaggaaaacgcgaagtacctgatcgaaaagatcaagctccatgacatgcaggaaggaaagtgtctgtactcgctggaggccattccgctggaggacttgctgaacaacccttttaactacgaagtggatcatatcattccgaggagcgtgtcattcgacaattccttcaacaacaaggtcctcgtgaagcaggaggaaaactcgaagaagggaaaccgcacgccgttccagtacctgagcagcagcgactccaagatttcctacgaaaccttcaagaagcacatcctcaacctggcaaaggggaagggtcgcatctccaagaccaagaaggaatatctgctggaagaaagagacatcaacagattctccgtgcaaaaggacttcatcaaccgcaacctcgtggatactagatacgctactcggggtctgatgaacctcctgagaagctactttagagtgaacaatctggacgtgaaggtcaagtcgattaacggaggtttcacctccttcctgcggcgcaagtggaagttcaagaaggaacggaacaagggctacaagcaccacgccgaggacgccctgatcattgccaacgccgacttcatcttcaaagaatggaagaaacttgacaaggctaagaaggtcatggaaaaccagatgttcgaagaaaagcaggccgagtctatgcctgaaatcgagactgaacaggagtacaaggaaatctttattacgccacaccagatcaaacacatcaaggatttcaaggattacaagtactcacatcgcgtggacaaaaagccgaacagggaactgatcaacgacaccctctactccacccggaaggatgacaaagggaataccctcatcgtcaacaaccttaacggcctgtacgacaaggacaacgataagctgaagaagctcattaacaagtcgcccgaaaagttgctgatgtaccaccacgaccctcagacttaccagaagctcaagctgatcatggagcagtatggggacgagaaaaacccgttgtacaagtactacgaagaaactgggaattatctgactaagtactccaagaaagataacggccccgtgattaagaagattaagtactacggcaacaagctgaacgcccatctggacatcaccgatgactaccctaattcccgcaacaaggtcgtcaagctgagcctcaagccctaccggtttgatgtgtaccttgacaatggagtgtacaagttcgtgactgtgaagaaccttgacgtgatcaagaaggagaactactacgaagtcaactccaagtgctacgaggaagcaaagaagttgaagaagatctcgaaccaggccgagttcattgcctccttctataacaacgacctgattaagatcaacggcgaactgtaccgcgtcattggcgtgaacaacgatctcctgaaccgcatcgaagtgaacatgatcgacatcacttaccgggaatacctggagaatatgaacgacaagcgcccgccccggatcattaagactatcgcctcaaagacccagtcgatcaagaagtacagcaccgacatcctgggcaacctgtacgaggtcaaatcgaagaagcacccccagatcatcaagaaggga

SEQ ID NO: 10 - DNA, 3159 bp, Staphylococcus aureus
  source 1..3159: mol_type = other DNA
atgaaaaggaactacattctggggctggccatcgggattacaagcgtggggtatgggattattgactatgaaacaagggacgtgatcgacgcaggcgtcagactgttcaaggaggccaacgtggaaaacaatgagggacggagaagcaagaggggagccaggcgcctgaaacgacggagaaggcacagaatccagagggtgaagaaactgctgttcgattacaacctgctgaccgaccattctgagctgagtggaattaatccttatgaagccagggtgaaaggcctgagtcagaagctgtcagaggaagagttttccgcagctctgctgcacctggctaagcgccgaggagtgcataacgtcaatgaggtggaagaggacaccggcaacgagctgtctacaaaggaacagatctcacgcaatagcaaagctctggaagagaagtatgtcgcagagctgcagctggaacggctgaagaaagatggcgaggtgagagggtcaattaataggttcaagacaagcgactacgtcaaagaagccaagcagctgctgaaagtgcagaaggcttaccaccagctggatcagagcttcatcgatacttatatcgacctgctggagactcggagaacctactatgagggaccaggagaagggagccccttcggatggaaagacatcaaggaatggtacgagatgctgatgggacattgcacctattttccagaagagctgagaagcgtcaagtacgcttataacgcagatctgtacaacgccctgaatgacctgaacaacctggtcatcaccagggatgaaaacgagaaactggaatactatgagaagttccagatcatcgaaaacgtgtttaagcagaagaaaaagcctacactgaaacagattgctaaggagatcctggtcaacgaagaggacatcaagggctaccgggtgacaagcactggaaaaccagagttcaccaatctgaaagtgtatcacgatattaaggacatcacagcacggaaagaaatcattgagaacgccgaactgctggatcagattgctaagatcctgactatctaccagagctccgaggacatccaggaagagctgactaacctgaacagcgagctgacccaggaagagatcgaacagattagtaatctgaaggggtacaccggaacacacaacctgtccctgaaagctatcaatctgattctggatgagctgtggcatacaaacgacaatcagattgcaatctttaaccggctgaagctggtcccaaaaaaggtggacctgagtcagcagaaagagatcccaaccacactggtggacgatttcattctgtcacccgtggtcaagcggagcttcatccagagcatcaaagtgatcaacgccatcatcaagaagtacggcctgcccaatgatatcattatcgagctggctagggagaagaacagcaaggacgcacagaagatgatcaatgagatgcagaaacgaaaccggcagaccaatgaacgcattgaagagattatccgaactaccgggaaagagaacgcaaagtacctgattgaaaaaatcaagctgcacgatatgcaggagggaaagtgtctgtattctctggaggccatccccctggaggacctgctgaacaatccattcaactacgaggtcgatcatattatccccagaagcgtgtccttcgacaattcctttaacaacaaggtgctggtcaagcaggaagagaactctaaaaagggcaataggactcctttccagtacctgtctagttcagattccaagatctcttacgaaacctttaaaaagcacattctgaatctggccaaaggaaagggccgcatcagcaagaccaaaaaggagtacctgctggaagagcgggacatcaacagattctccgtccagaaggattttattaaccggaatctggtggacacaagatacgctactcgcggcctgatgaatctgctgcgatcctatttccgggtgaacaatctggatgtgaaagtcaagtccatcaacggcgggttcacatcttttctgaggcgcaaatggaagtttaaaaaggagcgcaacaaagggtacaagcaccatgccgaagatgctctgattatcgcaaatgccgacttcatctttaaggagtggaaaaagctggacaaagccaagaaagtgatggagaaccagatgttcgaagagaagcaggccgaatctatgcccgaaatcgagacagaacaggagtacaaggagattttcatcactcctcaccagatcaagcatatcaaggatttcaaggactacaagtactctcaccgggtggataaaaagcccaacagagagctgatcaatgacaccctgtatagtacaagaaaagacgataaggggaataccctgattgtgaacaatctgaacggactgtacgacaaagataatgacaagctgaaaaagctgatcaacaaaagtcccgagaagctgctgatgtaccaccatgatcctcagacatatcagaaactgaagctgattatggagcagtacggcgacgagaagaacccactgtataagtactatgaagagactgggaactacctgaccaagtatagcaaaaaggataatggccccgtgatcaagaagatcaagtactatgggaacaagctgaatgcccatctggacatcacagacgattaccctaacagtcgcaacaaggtggtcaagctgtcactgaagccatacagattcgatgtctatctggacaacggcgtgtataaatttgtgactgtcaagaatctggatgtcatcaaaaaggagaactactatgaagtgaatagcaagtgctacgaagaggctaaaaagctgaaaaagattagcaaccaggcagagttcatcgcctccttttacaacaacgacctgattaagatcaatggcgaactgtatagggtcatcggggtgaacaatgatctgctgaaccgcattgaagtgaatatgattgacatcacttaccgagagtatctggaaaacatgaatgataagcgcccccctcgaattatcaaaacaattgcctctaagactcagagtatcaaaaagtactcaaccgacattctgggaaacctgtatgaggtgaagagcaaaaagcaccctcagattatcaaaaagggc

SEQ ID NO: 11 - DNA, 3159 bp, Staphylococcus aureus
  source 1..3159: mol_type = other DNA
atgaaaaggaactacattctggggctggacatcgggattacaagcgtggggtatgggattattgactatgaaacaagggacgtgatcgacgcaggcgtcagactgttcaaggaggccaacgtggaaaacaatgagggacggagaagcaagaggggagccaggcgcctgaaacgacggagaaggcacagaatccagagggtgaagaaactgctgttcgattacaacctgctgaccgaccattctgagctgagtggaattaatccttatgaagccagggtgaaaggcctgagtcagaagctgtcagaggaagagttttccgcagctctgctgcacctggctaagcgccgaggagtgcataacgtcaatgaggtggaagaggacaccggcaacgagctgtctacaaaggaacagatctcacgcaatagcaaagctctggaagagaagtatgtcgcagagctgcagctggaacggctgaagaaagatggcgaggtgagagggtcaattaataggttcaagacaagcgactacgtcaaagaagccaagcagctgctgaaagtgcagaaggcttaccaccagctggatcagagcttcatcgatacttatatcgacctgctggagactcggagaacctactatgagggaccaggagaagggagccccttcggatggaaagacatcaaggaatggtacgagatgctgatgggacattgcacctattttccagaagagctgagaagcgtcaagtacgcttataacgcagatctgtacaacgccctgaatgacctgaacaacctggtcatcaccagggatgaaaacgagaaactggaatactatgagaagttccagatcatcgaaaacgtgtttaagcagaagaaaaagcctacactgaaacagattgctaaggagatcctggtcaacgaagaggacatcaagggctaccgggtgacaagcactggaaaaccagagttcaccaatctgaaagtgtatcacgatattaaggacatcacagcacggaaagaaatcattgagaacgccgaactgctggatcagattgctaagatcctgactatctaccagagctccgaggacatccaggaagagctgactaacctgaacagcgagctgacccaggaagagatcgaacagattagtaatctgaaggggtacaccggaacacacaacctgtccctgaaagctatcaatctgattctggatgagctgtggcatacaaacgacaatcagattgcaatctttaaccggctgaagctggtcccaaaaaaggtggacctgagtcagcagaaagagatcccaaccacactggtggacgatttcattctgtcacccgtggtcaagcggagcttcatccagagcatcaaagtgatcaacgccatcatcaagaagtacggcctgcccaatgatatcattatcgagctggctagggagaagaacagcaaggacgcacagaagatgatcaatgagatgcagaaacgaaaccggcagaccaatgaacgcattgaagagattatccgaactaccgggaaagagaacgcaaagtacctgattgaaaaaatcaagctgcacgatatgcaggagggaaagtgtctgtattctctggaggccatccccctggaggacctgctgaacaatccattcaactacgaggtcgatcatattatccccagaagcgtgtccttcgacaattcctttaacaacaaggtgctggtcaagcaggaagaggcctctaaaaagggcaataggactcctttccagtacctgtctagttcagattccaagatctcttacgaaacctttaaaaagcacattctgaatctggccaaaggaaagggccgcatcagcaagaccaaaaaggagtacctgctggaagagcgggacatcaacagattctccgtccagaaggattttattaaccggaatctggtggacacaagatacgctactcgcggcctgatgaatctgctgcgatcctatttccgggtgaacaatctggatgtgaaagtcaagtccatcaacggcgggttcacatcttttctgaggcgcaaatggaagtttaaaaaggagcgcaacaaagggtacaagcaccatgccgaagatgctctgattatcgcaaatgccgacttcatctttaaggagtggaaaaagctggacaaagccaagaaagtgatggagaaccagatgttcgaagagaagcaggccgaatctatgcccgaaatcgagacagaacaggagtacaaggagattttcatcactcctcaccagatcaagcatatcaaggatttcaaggactacaagtactctcaccgggtggataaaaagcccaacagagagctgatcaatgacaccctgtatagtacaagaaaagacgataaggggaataccctgattgtgaacaatctgaacggactgtacgacaaagataatgacaagctgaaaaagctgatcaacaaaagtcccgagaagctgctgatgtaccaccatgatcctcagacatatcagaaactgaagctgattatggagcagtacggcgacgagaagaacccactgtataagtactatgaagagactgggaactacctgaccaagtatagcaaaaaggataatggccccgtgatcaagaagatcaagtactatgggaacaagctgaatgcccatctggacatcacagacgattaccctaacagtcgcaacaaggtggtcaagctgtcactgaagccatacagattcgatgtctatctggacaacggcgtgtataaatttgtgactgtcaagaatctggatgtcatcaaaaaggagaactactatgaagtgaatagcaagtgctacgaagaggctaaaaagctgaaaaagattagcaaccaggcagagttcatcgcctccttttacaacaacgacctgattaagatcaatggcgaactgtatagggtcatcggggtgaacaatgatctgctgaaccgcattgaagtgaatatgattgacatcacttaccgagagtatctggaaaacatgaatgataagcgcccccctcgaattatcaaaacaattgcctctaagactcagagtatcaaaaagtactcaaccgacattctgggaaacctgtatgaggtgaagagcaaaaagcaccctcagattatcaaaaagggc

SEQ ID NO: 12 - protein, 1082 aa, Neisseria meningitidis
MAAFKPNPINYILGLDIGIASVGWAMVEIDEDENPICLIDLGVRVFERAEVPKTGDSLAMARRLARSVRRLTRRRAHRLLRARRLLKREGVLQAADFDENGLIKSLPNTPWQLRAAALDRKLTPLEWSAVLLHLIKHRGYLSQRKNEGETADKELGALLKGVADNAHALQTGDFRTPAELALNKFEKESGHIRNQRGDYSHTFSRKDLQAELILLFEKQKEFGNPHVSGGLKEGIETLLMTQRPALSGDAVQKMLGHCTFEPAEPKAAKNTYTAERFIWLTKLNNLRILEQGSERPLTDTERATLMDEPYRKSKLTYAQARKLLGLEDTAFFKGLRYGKDNAEASTLMEMKAYHAISRALEKEGLKDKKSPLNLSPELQDEIGTAFSLFKTDEDITGRLKDRIQPEILEALLKHISFDKFVQISLKALRRIVPLMEQGKRYDEACAEIYGDHYGKKNTEEKIYLPPIPADEIRNPVVLRALSQARKVINGVVRRYGSPARIHIETAREVGKSFKDRKEIEKRQEENRKDREKAAAKFREYFPNFVGEPKSKDILKLRLYEQQHGKCLYSGKEINLGRLNEKGYVEIDHALPFSRTWDDSFNNKVLVLGSENQNKGNQTPYEYFNGKDNSREWQEFKARVETSRFPRSKKQRILLQKFDEDGFKERNLNDTRYVNRFLCQFVADRMRLTGKGKKRVFASNGQITNLLRGFWGLRKVRAENDRHHALDAVVVACSTVAMQQKITRFVRYKEMNAFDGKTIDKETGEVLHQKTHFPQPWEFFAQEVMIRVFGKPDGKPEFEEADTPEKLRTLLAEKLSSRPEAVHEYVTPLFVSRAPNRKMSGQGHMETVKSAKRLDEGVSVLRVPLTQLKLKDLEKMVNREREPKLYEALKARLEAHKDDPAKAFAEPFYKYDKAGNRTQQVKAVRVEQVQKTGVWVRNHNGIADNATMVRVDVFEKGDKYYLVPIYSWQVAKGILPDRAVVQGKDEEDWQLIDDSFNFKFSLHPNDLVEVITKKARMFGYFASCHRGTGNINIRIHDLDHKIGKNGILEGIGVKTALSFQKYQIDELGKEIRPCRLKKRPPVR

SEQ ID NO: 13 - DNA, 3249 bp, Neisseria meningitidis
  misc_feature 1..3249: note = Exemplary codon optimized Cas9
  source 1..3249: mol_type = other DNA
atggccgccttcaagcccaaccccatcaactacatcctgggcctggacatcggcatcgccagcgtgggctgggccatggtggagatcgacgaggacgagaaccccatctgcctgatcgacctgggtgtgcgcgtgttcgagcgcgctgaggtgcccaagactggtgacagtctggctatggctcgccggcttgctcgctctgttcggcgccttactcgccggcgcgctcaccgccttctgcgcgctcgccgcctgctgaagcgcgagggtgtgctgcaggctgccgacttcgacgagaacggcctgatcaagagcctgcccaacactccttggcagctgcgcgctgccgctctggaccgcaagctgactcctctggagtggagcgccgtgctgctgcacctgatcaagcaccgcggctacctgagccagcgcaagaacgagggcgagaccgccgacaaggagctgggtgctctgctgaagggcgtggccgacaacgcccacgccctgcagactggtgacttccgcactcctgctgagctggccctgaacaagttcgagaaggagagcggccacatccgcaaccagcgcggcgactacagccacaccttcagccgcaaggacctgcaggccgagctgatcctgctgttcgagaagcagaaggagttcggcaacccccacgtgagcggcggcctgaaggagggcatcgagaccctgctgatgacccagcgccccgccctgagcggcgacgccgtgcagaagatgctgggccactgcaccttcgagccagccgagcccaaggccgccaagaacacctacaccgccgagcgcttcatctggctgaccaagctgaacaacctgcgcatcctggagcagggcagcgagcgccccctgaccgacaccgagcgcgccaccctgatggacgagccctaccgcaagagcaagctgacctacgcccaggcccgcaagctgctgggtctggaggacaccgccttcttcaagggcctgcgctacggcaaggacaacgccgaggccagcaccctgatggagatgaaggcctaccacgccatcagccgcgccctggagaaggagggcctgaaggacaagaagagtcctctgaacctgagccccgagctgcaggacgagatcggcaccgccttcagcctgttcaagaccgacgaggacatcaccggccgcctgaaggaccgcatccagcccgagatcctggaggccctgctgaagcacatcagcttcgacaagttcgtgcagatcagcctgaaggccctgcgccgcatcgtgcccctgatggagcagggcaagcgctacgacgaggcctgcgccgagatctacggcgaccactacggcaagaagaacaccgaggagaagatctacctgcctcctatccccgccgacgagatccgcaaccccgtggtgctgcgcgccctgagccaggcccgcaaggtgatcaacggcgtggtgcgccgctacggcagccccgcccgcatccacatcgagaccgcccgcgaggtgggcaagagcttcaaggaccgcaaggagatcgagaagcgccaggaggagaaccgcaaggaccgcgagaaggccgccgccaagttccgcgagtacttccccaacttcgtgggcgagcccaagagcaaggacatcctgaagctgcgcctgtacgagcagcagcacggcaagtgcctgtacagcggcaaggagatcaacctgggccgcctgaacgagaagggctacgtggagatcgaccacgccctgcccttcagccgcacctgggacgacagcttcaacaacaaggtgctggtgctgggcagcgagaaccagaacaagggcaaccagaccccctacgagtacttcaacggcaaggacaacagccgcgagtggcaggagttcaaggcccgcgtggagaccagccgcttcccccgcagcaagaagcagcgcatcctgctgcagaagttcgacgaggacggcttcaaggagcgcaacctgaacgacacccgctacgtgaaccgcttcctgtgccagttcgtggccgaccgcatgcgcctgaccggcaagggcaagaagcgcgtgttcgccagcaacggccagatcaccaacctgctgcgcggcttctggggcctgcgcaaggtgcgcgccgagaacgaccgccaccacgccctggacgccgtggtggtggcctgcagcaccgtggccatgcagcagaagatcacccgcttcgtgcgctacaaggagatgaacgccttcgacggtaaaaccatcgacaaggagaccggcgaggtgctgcaccagaagacccacttcccccagccctgggagttcttcgcccaggaggtgatgatccgcgtgttcggcaagcccgacggcaagcccgagttcgaggaggccgacacccccgagaagctgcgcaccctgctggccgagaagctgagcagccgccctgaggccgtgcacgagtacgtgactcctctgttcgtgagccgcgcccccaaccgcaagatgagcggtcagggtcacatggagaccgtgaagagcgccaagcgcctggacgagggcgtgagcgtgctgcgcgtgcccctgacccagctgaagctgaaggacctggagaagatggtgaaccgcgagcgcgagcccaagctgtacgaggccctgaaggcccgcctggaggcccacaaggacgaccccgccaaggccttcgccgagcccttctacaagtacgacaaggccggcaaccgcacccagcaggtgaaggccgtgcgcgtggagcaggtgcagaagaccggcgtgtgggtgcgcaaccacaacggcatcgccgacaacgccaccatggtgcgcgtggacgtgttcgagaagggcgacaagtactacctggtgcccatctacagctggcaggtggccaagggcatcctgcccgaccgcgccgtggtgcagggcaaggacgaggaggactggcagctgatcgacgacagcttcaacttcaagttcagcctgcaccccaacgacctggtggaggtgatcaccaagaaggcccgcatgttcggctacttcgccagctgccaccgcggcaccggcaacatcaacatccgcatccacgacctggaccacaagatcggcaagaacggcatcctggagggcatcggcgtgaagaccgccctgagcttccagaagtaccagatcgacgagctgggcaaggagatccgcccctgccgcctgaagaagcgccctcctgtgcgctaa

SEQ ID NO: 14 - protein, 859 aa, synthetic construct
  REGION 1..859: note = Synthetic Cas9 consensus sequence derived from Sm, Sp, St, and Li Cas9 sequences
  VARIANT 4: note = Xaa can be any naturally occurring amino acid
  REGION 8..18: note = misc_feature - N-terminal RuvC-like domain
  VARIANT 21: note = Xaa can be any naturally occurring amino acid
  VARIANT 23: note = Xaa can be any naturally occurring amino acid
  VARIANT 24: note = Xaa can be any naturally occurring amino acid
  VARIANT 26: note = Xaa can be any naturally occurring amino acid
  REGION 29..31: note = misc_feature - Each Xaa can independently be any naturally occurring amino acid
  VARIANT 33: note = Xaa can be any naturally occurring amino acid
  VARIANT 36: note = Xaa can be any naturally occurring amino acid
  VARIANT 45: note = Xaa can be any naturally occurring amino acid
  VARIANT 54: note = Xaa can be any naturally occurring amino acid
  VARIANT 63: note = Xaa can be any naturally occurring amino acid
  VARIANT 71: note = Xaa can be any naturally occurring amino acid
  VARIANT 75: note = Xaa can be any naturally occurring amino acid
  VARIANT 76: note = Xaa can be any naturally occurring amino acid
  REGION 78..80: note = misc_feature - Each Xaa can independently be any naturally occurring amino acid
  VARIANT 82: note = Xaa can be any naturally occurring amino acid
  VARIANT 84: note = Xaa can be any naturally occurring amino acid
  VARIANT 85: note = Xaa can be any naturally occurring amino acid
  VARIANT 89: note = Xaa can be any naturally occurring amino acid
  VARIANT 90: note = Xaa can be any naturally occurring amino acid
  VARIANT 98: note = Xaa can be any naturally occurring amino acid
  VARIANT 100: note = Xaa can be any naturally occurring amino acid
  VARIANT 106: note = Xaa can be any naturally occurring amino acid
  VARIANT 113: note = Xaa can be any naturally occurring amino acid
  VARIANT 116: note = Xaa can be any naturally occurring amino acid
  VARIANT 125: note = Xaa can be any naturally occurring amino acid
  VARIANT 126: note = Xaa can be any naturally occurring amino acid
  REGION 128..133: note = misc_feature - Each Xaa can independently be any naturally occurring amino acid
  VARIANT 135: note = Xaa can be any naturally occurring amino acid
  VARIANT 137: note = Xaa can be any naturally occurring amino acid
  REGION 139..147: note = misc_feature - Each Xaa can independently be any naturally occurring amino acid
  REGION 153..155: note = misc_feature - Each Xaa can independently be any naturally occurring amino acid
  VARIANT 157: note = Xaa can be any naturally occurring amino acid
  VARIANT 159: note = Xaa can be any naturally occurring amino acid
  VARIANT 161: note = Xaa can be any naturally occurring amino acid
  VARIANT 163: note = Xaa can be any naturally occurring amino acid
  REGION 166..168: note = misc_feature - Each Xaa can independently be any naturally occurring amino acid
  VARIANT 170: note = Xaa can be any naturally occurring amino acid
  VARIANT 171: note = Xaa can be any naturally occurring amino acid
  REGION 173..175: note = misc_feature - Each Xaa can independently be any naturally occurring amino acid
  VARIANT 177: note = Xaa can be any naturally occurring amino acid
  VARIANT 183: note = Xaa can be any naturally occurring amino acid
  REGION 185..187: note = misc_feature - Each Xaa can independently be any naturally occurring amino acid
  VARIANT 189: note = Xaa can be any naturally occurring amino acid
  REGION 192..195: note = misc_feature - Each Xaa can independently be any naturally occurring amino acid
  VARIANT 198: note = Xaa can be any naturally occurring amino acid
  VARIANT 199: note = Xaa can be any naturally occurring amino acid
  VARIANT 202: note = Xaa can be any naturally occurring amino acid
  VARIANT 206: note = Xaa can be any naturally occurring amino acid
  VARIANT 207: note = Xaa can be any naturally occurring amino acid
  VARIANT 210: note = Xaa can be any naturally occurring amino acid
  VARIANT 212: note = Xaa can be any naturally occurring amino acid
  VARIANT 213: note = Xaa can be any naturally occurring amino acid
  VARIANT 219: note = Xaa can be any naturally occurring amino acid
  VARIANT 220: note = Xaa can be any naturally occurring amino acid
  VARIANT 222: note = Xaa can be any naturally occurring amino acid
  VARIANT 224: note = Xaa can be any naturally occurring amino acid
  VARIANT 226: note = Xaa can be any naturally occurring amino acid
  VARIANT 236: note = Xaa can be any naturally occurring amino acid
  VARIANT 240: note = Xaa can be any naturally occurring amino acid
  VARIANT 241: note = Xaa can be any naturally occurring amino acid
  REGION 244..246: note = misc_feature - Each Xaa can independently be any naturally occurring amino acid
  VARIANT 248: note = Xaa can be any naturally occurring amino acid
  VARIANT 249: note = Xaa can be any naturally occurring amino acid
  VARIANT 250: note = Xaa can be any naturally occurring amino acid
  REGION 252..254: note = misc_feature - Each Xaa can independently be any naturally occurring amino acid
  VARIANT 256: note = Xaa can be any naturally occurring amino acid
  VARIANT 257: note = Xaa can be any naturally occurring amino acid
  VARIANT 268: note = Xaa can be any naturally occurring amino acid
  VARIANT 271: note = Xaa can be any naturally occurring amino acid
  VARIANT 277: note = Xaa can be any naturally occurring amino acid
  VARIANT 280: note = Xaa can be any naturally occurring amino acid
  VARIANT 281: note = Xaa can be any naturally occurring amino acid
  VARIANT 283: note = Xaa can be any naturally occurring amino acid
  VARIANT 289: note = Xaa can be any naturally occurring amino acid
  VARIANT 290: note = Xaa can be any naturally occurring amino acid
  REGION 292..294: note = misc_feature - Each Xaa can independently be any naturally occurring amino acid
  VARIANT 301: note = Xaa can be any naturally occurring amino acid
  VARIANT 308: note = Xaa can be any naturally occurring amino acid
  REGION 319..322: note = misc_feature - Each Xaa can independently be any naturally occurring amino acid
  VARIANT 328: note = Xaa can be any naturally occurring amino acid
  VARIANT 329: note = Xaa can be any naturally occurring amino acid
  REGION 335..337: note = misc_feature - Each Xaa can independently be any naturally occurring amino acid
  VARIANT 346: note = Xaa can be any naturally occurring amino acid
  VARIANT 347: note = Xaa can be any naturally occurring amino acid
  REGION 356..361: note = misc_feature - Each Xaa can independently be any naturally occurring amino acid
  VARIANT 363: note = Xaa can be any naturally occurring amino acid
  REGION 370..373: note = misc_feature - Each Xaa can independently be any naturally occurring amino acid
  VARIANT 375: note = Xaa can be any naturally occurring amino acid
  VARIANT 376: note = Xaa can be any naturally occurring amino acid
  VARIANT 379: note = Xaa can be any naturally occurring amino acid
  REGION 386..390: note = misc_feature - Each Xaa can independently be any naturally occurring amino acid
  VARIANT 393: note = Xaa can be any naturally occurring amino acid
  VARIANT 395: note = Xaa can be any naturally occurring amino acid
  VARIANT 396: note = Xaa can be any naturally occurring amino acid
  VARIANT 400: note = Xaa can be any naturally occurring amino acid
  VARIANT 403: note = Xaa can be any naturally occurring amino acid
  VARIANT 407: note = Xaa can be any naturally occurring amino acid
  VARIANT 410: note = Xaa can be any naturally occurring amino acid
  VARIANT 411: note = Xaa can be any naturally occurring amino acid
  REGION 413..416: note = misc_feature - Each Xaa can independently be any naturally occurring amino acid
  VARIANT 418: note = Xaa can be any naturally occurring amino acid
  VARIANT 422: note = Xaa can be any naturally occurring amino acid
  VARIANT 428: note = Xaa can be any naturally occurring amino acid
  VARIANT 431: note = Xaa can be any naturally occurring amino acid
  VARIANT 433: note = Xaa can be any naturally occurring amino acid
  REGION 437..439: note = misc_feature - Each Xaa can independently be any naturally occurring amino acid
  VARIANT 445: note = Xaa can be any naturally occurring amino acid
  VARIANT 451: note = Xaa can be any naturally occurring amino acid
  VARIANT 456: note = Xaa can be any naturally occurring amino acid
  VARIANT 459: note = Xaa can be any naturally occurring amino acid
  REGION 465..469: note = misc_feature - Each Xaa can independently be any naturally occurring amino acid
  VARIANT 481: note = Xaa can be any naturally occurring amino acid
  VARIANT 484: note = Xaa can be any naturally occurring amino acid
  VARIANT 490: note = Xaa can be any naturally occurring amino acid
  VARIANT 494: note = Xaa can be any naturally occurring amino acid
  REGION 495..502: note = misc_feature - RuvC-like domain
  VARIANT 497: note = Xaa can be any naturally occurring amino acid
  VARIANT 506: note = Xaa can be any naturally occurring amino acid
  VARIANT 510: note = Xaa can be any naturally occurring amino acid
  VARIANT 513: note = Xaa can be any naturally occurring amino acid
  VARIANT 514: note = Xaa can be any naturally occurring amino acid
  VARIANT 517: note = Xaa can be any naturally occurring amino acid
  VARIANT 520: note = Xaa can be any naturally occurring amino acid
  VARIANT 525: note = Xaa can be any naturally occurring amino acid
  VARIANT 526: note = Xaa can be any naturally occurring amino acid
  VARIANT 529: note = Xaa can be any naturally occurring amino acid
  VARIANT 531: note = Xaa can be any naturally occurring amino acid
  VARIANT 532: note = Xaa can be any naturally occurring amino acid
  VARIANT 534: note = Xaa can be any naturally occurring amino acid
  VARIANT 542: note = Xaa can be any naturally occurring amino acid
  VARIANT 546: note = Xaa can be any naturally occurring amino acid
  VARIANT 547: note = Xaa can be any naturally occurring amino acid
  VARIANT 553: note = Xaa can be any naturally occurring amino acid
  REGION 555..575: note = misc_feature - HNH-like domain
  VARIANT 556: note = Xaa can be any naturally occurring amino acid
  VARIANT 560: note = Xaa can be any naturally occurring amino acid
  VARIANT 563: note = Xaa can be any naturally occurring amino acid
  VARIANT 565: note = Xaa can be any naturally occurring amino acid
  VARIANT 567: note = Xaa can be any naturally occurring amino acid
  VARIANT 579: note = Xaa can be any naturally occurring amino acid
  VARIANT 582: note = Xaa can be any naturally occurring amino acid
  VARIANT 583: note = Xaa can be any naturally occurring amino acid
  VARIANT 585: note = Xaa can be any naturally occurring amino acid
  VARIANT 588: note = Xaa can be any naturally occurring amino acid
  VARIANT 590: note = Xaa can be any naturally occurring amino acid
  VARIANT 592: note = Xaa can be any naturally occurring amino acid
  REGION 594..596: note = misc_feature - Each Xaa can independently be any naturally occurring amino acid
  VARIANT 610: note = Xaa can be any naturally occurring amino acid
  VARIANT 616: note = Xaa can be any naturally occurring amino acid
  VARIANT 628: note = Xaa can be any naturally occurring amino acid
  VARIANT 631: note = Xaa can be any naturally occurring amino acid
  VARIANT 633: note = Xaa can be any naturally occurring amino acid
  VARIANT 634: note = Xaa can be any naturally occurring amino acid
  VARIANT 636: note = Xaa can be any naturally occurring amino acid
  REGION 638..641: note = misc_feature - Each Xaa can independently be any naturally occurring amino acid
  REGION 643..645: note = misc_feature - Each Xaa can independently be any naturally occurring amino acid
  VARIANT 653: note = Xaa can be any naturally occurring amino acid
  VARIANT 659: note = Xaa can be any naturally occurring amino acid
  VARIANT 665: note = Xaa can be any naturally occurring amino acid
  VARIANT 666: note = Xaa can be any naturally occurring amino acid
  VARIANT 668: note = Xaa can be any naturally occurring amino acid
  VARIANT 669: note = Xaa can be any naturally occurring amino acid
  REGION 670..677: note = misc_feature - RuvC-like domain
  VARIANT 680: note = Xaa can be any naturally occurring amino acid
  VARIANT 681: note = Xaa can be any naturally occurring amino acid
  VARIANT 686: note = Xaa can be any naturally occurring amino acid
  VARIANT 697: note = Xaa can be any naturally occurring amino acid
  VARIANT 708: note = Xaa can be any naturally occurring amino acid
  VARIANT 710: note = Xaa can be any naturally occurring amino acid
  VARIANT 711: note = Xaa can be any naturally occurring amino acid
  VARIANT 714: note = Xaa can be any naturally occurring amino acid
  REGION 717..720: note = misc_feature - Each Xaa can independently be any naturally occurring amino acid
  VARIANT 722: note = Xaa can be any naturally occurring amino acid
  VARIANT 725: note = Xaa can be any naturally occurring amino acid
  VARIANT 727: note = Xaa can be any naturally occurring amino acid
  REGION 733..735: note = misc_feature - Each Xaa can independently be any naturally occurring amino acid
  VARIANT 742: note = Xaa can be any naturally occurring amino acid
  REGION 749..754: note = misc_feature - Each Xaa can independently be any naturally occurring amino acid
  REGION 758..761: note = misc_feature - Each Xaa can independently be any naturally occurring amino acid
  REGION 763..768: note = misc_feature - Each Xaa can independently be any naturally occurring amino acid
  VARIANT 771: note = Xaa can be any naturally occurring amino acid
  REGION 774..777: note = misc_feature - Each Xaa can independently be any naturally occurring amino acid
  VARIANT 782: note = Xaa can be any naturally occurring amino acid
  REGION 784..786: note = misc_feature - Each Xaa can independently be any naturally occurring amino acid
  VARIANT 788: note = Xaa can be any naturally occurring amino acid
  VARIANT 790: note = Xaa can be any naturally occurring amino acid
  VARIANT 795: note = Xaa can be any naturally occurring amino acid
  VARIANT 799: note = Xaa can be any naturally occurring amino acid
  VARIANT 801: note = Xaa can be any naturally occurring amino acid
  VARIANT 802: note = Xaa can be any naturally occurring amino acid
  VARIANT 804: note = Xaa can be any naturally occurring amino acid
  REGION 806..813: note = misc_feature - Each Xaa can independently be any naturally occurring amino acid
  REGION 815..818: note = misc_feature - Each Xaa can independently be any naturally occurring amino acid
  REGION 823..827: note = misc_feature - Each Xaa can independently be any naturally occurring amino acid
  VARIANT 829: note = Xaa can be any naturally occurring amino acid
  VARIANT 830: note = Xaa can be any naturally occurring amino acid
  VARIANT 832: note = Xaa can be any naturally occurring amino acid
  REGION 835..837: note = misc_feature - Each Xaa can independently be any naturally occurring amino acid
  REGION 842..844: note = misc_feature - Each Xaa can independently be any naturally occurring amino acid
  VARIANT 846: note = Xaa can be any naturally occurring amino acid
  VARIANT 848: note = Xaa can be any naturally occurring amino acid
  VARIANT 851: note = Xaa can be any naturally occurring amino acid
  VARIANT 696: note = Xaa can be any naturally occurring amino acid
  VARIANT 273: note = Xaa can be any naturally occurring amino acid
  VARIANT 660: note = Xaa can be any naturally occurring amino acid
  VARIANT 704: note = Xaa can be any naturally occurring amino acid
  VARIANT 740: note = Xaa can be any naturally occurring amino acid
  VARIANT 820: note = Xaa can be any naturally occurring amino acid
  VARIANT 857: note = Xaa can be any naturally occurring amino acid
  VARIANT 273: note = Xaa can be any naturally occurring amino acid
  VARIANT 398: note = Xaa can be any naturally occurring amino acid
  VARIANT 482: note = Xaa can be any naturally occurring amino acid
  VARIANT 657: note = Xaa can be any naturally occurring amino acid
  VARIANT 683: note = Xaa can be any naturally occurring amino acid
MKYXIGLDIGTNSVGWAVTDXYXXKXKGXXXIXKNXGLFDGTARXRTARRRRRXNRIYLQIFXEMDFFRLXSFVXXKXXXPXFXXEYHXXPTIYHLRXLXKDLRLXYLALAHXIKXRGNFLIEGXXNXXXXXXYXFXIXXXXXXXXXPEKGFXXXLXGXFXFXLEXXXKXXYXXXLXLLIGDXYXXXFXAKXXXXLSXXVTXALSXXMIXRXXHDLLKXXYXEXFXKGYAGYIDGXQFYXXKLXXXGXXXKXXXEXXLRKQRTFDNGXIPXQXHLEXAIXXQXYPFLNXXIXXXTFRIPYXVGPLAGXSFAWRKIPWNXXXXDSAFIXXMTDLPXXXVLPKHSLYXXVYNELTKVXXXXXXKXIFKRKVXXXXGXXFNXSTYHDLXXXXXLDXNXXEXIXLTXFEDXMIXXLXXXXKXLRRXYTGWGXLSXLXGIRXXXSTILDXLDNRNXMQLIXDLXFKIKQXXXXXGSPAIKKGILQXXKXVDELVXMGPXIVXEMARENQTXGNSXRKXXKEXGSXILKEXXNLXNXXLXLYYLQNGXDMYXXLDILSXYDXDHIXPQXFXDXSIDNVLSNRKDXVPXXVXKKXWXLXLXXXRKFDLTKAERGGLXDKAFIXRQLVETRQITKXVAXLXXNXDXXXXVXXXTLKSLVSXFRKXFXXLYKVXXNXXHHAHDAYLNVXXLXYPXLEEFVYGDYXXKATKFYXNIMXFXXGEXWKXXXXVXMQXNXVKKEQXXXPKNSXLXKDKYGGXXXXXXKGKXXXXIXXXXXXFLXGYXXXXLPKYXLXXXGXRXLASEXKGNXLXXLXAXXXXXXXXEXXXXFXANXXXXXLXXGXAFXXXIRRYXXXTXIXQSXTGLYEXRL

SEQ ID NO: 15 - protein, 8 aa, synthetic construct
  REGION 1..8: note = RuvC-like domain
  VARIANT 2: note = Xaa is Val or His
  VARIANT 3: note = Xaa is Ile, Leu, or Val
  VARIANT 5: note = Xaa is Met or Thr
IXXEXARE

SEQ ID NO: 16 - protein, 8 aa, synthetic construct
  REGION 1..8: note = RuvC-like domain
  VARIANT 3: note = Xaa is Ile, Leu, or Val
IVXEMARE

SEQ ID NO: 17 - protein, 8 aa, synthetic construct
  REGION 1..8: note = RuvC-like domain
  VARIANT 4: note = Xaa is His or Leu
  VARIANT 7: note = Xaa is Arg or Val
  VARIANT 8: note = Xaa is Glu or Val
HHAXDAXX

SEQ ID NO: 18 - protein, 8 aa, synthetic construct
  REGION 1..8: note = RuvC-like domain
HHAHDAYL

SEQ ID NO: 19 - protein, 30 aa, synthetic construct
  REGION 1..30: note = N-terminal RuvC-like domain
  VARIANT 2: note = Xaa is Lys or Pro
  VARIANT 4: note = Xaa is Val, Leu, Ile, or Phe
  VARIANT 5: note = Xaa is Gly, Ala, or Ser
  VARIANT 6: note = Xaa is Leu, Ile, Val, or Phe
  MOD_RES 7..26: note = N-terminal RuvC-like domain, each Xaa can be any amino acid or absent, region may encompass 5-20 residues
  VARIANT 29: note = Xaa is Asp, Glu, Asn, or Gln
KXYXXXXXXXXXXXXXXXXXXXXXXXTDXY

SEQ ID NO: 20 - skipped

SEQ ID NO: 21 - protein, 12 aa, synthetic construct
  REGION 1..12: note = N-terminal RuvC-like domain
  VARIANT 2: note = Xaa is Ile, Val, Met, Leu, or Thr
  VARIANT 4: note = Xaa is Thr, Ile, Val, Ser, Asn, Tyr, Glu, or Leu
  VARIANT 5: note = Xaa is Asn, Ser, Gly, Ala, Asp, Thr, Arg, Met, or Phe
  VARIANT 7: note = Xaa is Val, Ile, Leu, Cys, Thr, or Phe
  VARIANT 9: note = Xaa is Trp, Phe, Val, Tyr, Ser, or Leu
  VARIANT 10: note = Xaa is Ala, Ser, Cys, Val, or Gly
  VARIANT 11: note = Xaa is Val, Ile, Leu, Ala, Met, or His
  VARIANT 12: note = Any amino acid or absent
DXGXXSXGXXXX

SEQ ID NO: 22 - protein, 12 aa, synthetic construct
  REGION 1..12: note = N-terminal RuvC-like domain
  VARIANT 4: note = Xaa is Thr, Ile, Val, Ser, Asn, Tyr, Glu, or Leu
  VARIANT 5: note = Xaa is Asn, Ser, Gly, Ala, Asp, Thr, Arg, Met, or Phe
  VARIANT 11: note = Xaa is Val, Ile, Leu, Ala, Met, or His
  VARIANT 12: note = Any amino acid or absent
DIGXXSVGWAXX

SEQ ID NO: 23 - protein, 12 aa, synthetic construct
  REGION 1..12: note = N-terminal RuvC-like domain
  MOD_RES 12: note = Any non-polar alkyl amino acid or a hydroxyl amino acid
DIGTNSVGWAVX

SEQ ID NO: 24 - protein, 73 aa, synthetic construct
  REGION 1..73: note = HNH-like domain
  VARIANT 8: note = Xaa is Lys or Arg
  VARIANT 12: note = Xaa is Val or Thr
  VARIANT 13: note = Xaa is Gly or Asp
  VARIANT 14: note = Xaa is Glu, Gln, or Asp
  VARIANT 15: note = Xaa is Glu or Asp
  VARIANT 19: note = Xaa is Asp, Asn, or His
  VARIANT 20: note = Xaa is Tyr, Arg, or Asn
  VARIANT 23: note = Xaa is Gln, Asp, or Asn
  MOD_RES 25..64: note = HNH-like domain, each Xaa can be any amino acid or absent, region may encompass 15-40 residues
  VARIANT 67: note = Xaa is Gly or Glu
  VARIANT 69: note = Xaa is Ser or Gly
  VARIANT 71: note = Xaa is Asp or Asn
LYYLQNGXDMYXXXXLDIXXLSXYXXXXXXXXXXXXXXXXXXXXXXXXXXXXXXXXXXXXXXXXNRXKXDXVP

SEQ ID NO: 25 - protein, 27 aa, synthetic construct
  REGION 1..27: note = HNH-like domain
  VARIANT 1: note = Xaa is Asp, Glu, Gln, or Asn
  VARIANT 2: note = Xaa is Leu, Ile, Arg, Gln, Val, Met, or Lys
  VARIANT 3: note = Xaa is Asp or Glu
  VARIANT 5: note = Xaa is Ile, Val, Thr, Ala, or Leu
  VARIANT 6: note = Xaa is Val, Tyr, Ile, Leu, Phe, or Trp
  VARIANT 8: note = Xaa is Gln, His, Arg, Lys, Tyr, Ile, Leu, Phe, or Trp
  VARIANT 9: note = Xaa is Ser, Ala, Asp, Thr, or Lys
  VARIANT 10: note = Xaa is Phe, Leu, Val, Lys, Tyr, Met, Ile, Arg, Ala, Glu, Asp, or Gln
  VARIANT 11: note = Xaa is Leu, Arg, Thr, Ile, Val, Ser, Cys, Tyr, Lys, Phe, or Gly
  VARIANT 12: note = Xaa is Lys, Gln, Tyr, Thr, Phe, Leu, Trp, Met, Ala, Glu, Gly, or Ser
  VARIANT 13: note = Xaa is Asp, Ser, Asn, Arg, Leu, or Thr
  VARIANT 14: note = Xaa is Asp, Asn, or Ser
  VARIANT 15: note = Xaa is Ser, Ala, Thr, Gly, or Arg
  VARIANT 16: note = Xaa is Ile, Leu, Phe, Ser, Arg, Tyr, Gln, Trp, Asp, Lys, or His
  VARIANT 17: note = Xaa is Asp, Ser, Ile, Asn, Glu, Ala, His, Phe, Leu, Gln, Met, Gly, Tyr, or Val
  VARIANT 19: note = Xaa is Lys, Leu, Arg, Met, Thr, or Phe
  VARIANT 20: note = Xaa is Val, Leu, Ile, Ala, or Thr
  VARIANT 21: note = Xaa is Leu, Ile, Val, or Ala
  VARIANT 22: note = Xaa is Thr, Val, Cys, Glu, Ser, or Ala
  VARIANT 23: note = Xaa is Arg, Phe, Thr, Trp, Glu, Leu, Asn, Cys, Lys, Val, Ser, Gln, Ile, Tyr, His, or Ala
  VARIANT 24: note = Xaa is Ser, Pro, Arg, Lys, Asn, Ala, His, Gln, Gly, or Leu
  VARIANT 25: note = Xaa is Asp, Gly, Thr, Asn, Ser, Lys, Ala, Ile, Glu, Leu, Gln, Arg, or Tyr
  VARIANT 26: note = Xaa is Lys, Val, Ala, Glu, Tyr, Ile, Cys, Leu, Ser, Thr, Gly, Lys, Met, Asp, or Phe
XXXHXXPXXXXXXXXXXNXXXXXXXXN

SEQ ID NO: 26 - protein, 27 aa, synthetic construct
  REGION 1..27: note = HNH-like domain
  VARIANT 1: note = Xaa is Asp or Glu
  VARIANT 2: note = Xaa is Leu, Ile, Arg, Gln, Val, Met, or Lys
  VARIANT 3: note = Xaa is Asp or Glu
  VARIANT 5: note = Xaa is Ile, Val, Thr, Ala, or Leu
  VARIANT 6: note = Xaa is Val, Tyr, Ile, Leu, Phe, or Trp
  VARIANT 8: note = Xaa is Gln, His, Arg, Lys, Tyr, Ile, Leu, Phe, or Trp
  VARIANT 10: note = Xaa is Phe, Leu, Val, Lys, Tyr, Met, Ile, Arg, Ala, Glu, Asp, or Gln
  VARIANT 11: note = Xaa is Leu, Arg, Thr, Ile, Val, Ser, Cys, Tyr, Lys, Phe, or Gly
  VARIANT 12: note = Xaa is Lys, Gln, Tyr, Thr, Phe, Leu, Trp, Met, Ala, Glu, Gly, or Ser
  VARIANT 16: note = Xaa is Ile, Leu, Phe, Ser, Arg, Tyr, Gln, Trp, Asp, Lys, or His
  VARIANT 17: note = Xaa is Asp, Ser, Ile, Asn, Glu, Ala, His, Phe, Leu, Gln, Met, Gly, Tyr, or Val
  VARIANT 22: note = Xaa is Thr, Val, Cys, Glu, Ser, or Ala
  VARIANT 23: note = Xaa is Arg, Phe, Thr, Trp, Glu, Leu, Asn, Cys, Lys, Val, Ser, Gln, Ile, Tyr, His, or Ala
  VARIANT 24: note = Xaa is Ser, Pro, Arg, Lys, Asn, Ala, His, Gln, Gly, or Leu
  VARIANT 25: note = Xaa is Asp, Gly, Thr, Asn, Ser, Lys, Ala, Ile, Glu, Leu, Gln, Arg, or Tyr
  VARIANT 26: note = Xaa is Lys, Val, Ala, Glu, Tyr, Ile, Cys, Leu, Ser, Thr, Gly, Lys, Met, Asp, or Phe
XXXHXXPXSXXXDDSXXNKVLXXXXXN

SEQ ID NO: 27 - protein, 27 aa, synthetic construct
  REGION 1..27: note = HNH-like domain
  VARIANT 1: note = Xaa is Asp or Glu
  VARIANT 3: note = Xaa is Asp or Glu
  VARIANT 8: note = Xaa is Gln, His, Arg, Lys, Tyr, Ile, Leu, or Trp
  VARIANT 10: note = Xaa is Phe, Leu, Val, Lys, Tyr, Met, Ile, Arg, Ala, Glu, Asp, or Gln
  VARIANT 11: note = Xaa is Leu, Arg, Thr, Ile, Val, Ser, Cys, Tyr, Lys, Phe, or Gly
  VARIANT 12: note = Xaa is Lys, Gln, Tyr, Thr, Phe, Leu, Trp, Met, Ala, Glu, Gly, or Ser
  VARIANT 16: note = Xaa is Ile, Leu, Phe, Ser, Arg, Tyr, Gln, Trp, Asp, Lys, or His
  VARIANT 17: note = Xaa is Asp, Ser, Ile, Asn, Glu, Ala, His, Phe, Leu, Gln, Met, Gly, Tyr, or Val
  VARIANT 23: note = Xaa is Arg, Phe, Thr, Trp, Glu, Leu, Asn, Cys, Lys, Val, Ser, Gln, Ile, Tyr, His, or Ala
  VARIANT 24: note = Xaa is Ser, Pro, Arg, Lys, Asn, Ala, His, Gln, Gly, or Leu
  VARIANT 25: note = Xaa is Asp, Gly, Thr, Asn, Ser, Lys, Ala, Ile, Glu, Leu, Gln, Arg, or Tyr
  VARIANT 26: note = Xaa is Lys, Val, Ala, Glu, Tyr, Ile, Cys, Leu, Ser, Thr, Gly, Lys, Met, Asp, or Phe
XVXHIVPXSXXXDDSXXNKVLTXXXXN

SEQ ID NO: 28 - protein, 27 aa, synthetic construct
  REGION 1..27: note = HNH-like domain
  VARIANT 2: note = Xaa is Ile or Val
  VARIANT 6: note = Xaa is Ile or Val
  VARIANT 9: note = Xaa is Ala or Ser
  VARIANT 11: note = Xaa is Ile or Leu
  VARIANT 12: note = Xaa is Lys or Thr
  VARIANT 14: note = Xaa is Asp or Asn
  VARIANT 19: note = Xaa is Arg, Lys, or Leu
  VARIANT 22: note = Xaa is Thr or Val
  VARIANT 23: note = Xaa is Ser or Arg
  VARIANT 25: note = Xaa is Lys, Asp, or Ala
  VARIANT 26: note = Xaa is Glu, Lys, Gly, or Asn
DXDHIXPQXFXXDXSIDNXVLXXSXXN

SEQ ID NO: 29 - RNA, 116 nt, synthetic construct
  misc_feature 1..116: note = gRNA
  misc_feature 1..20: note = targeting region
  misc_feature 21..42: note = first complementarity domain
  misc_feature 43..46: note = linking domain
  misc_feature 47..70: note = second complementarity domain
  source 1..116: mol_type = other RNA
  misc_difference 1..20: note = a, c, u, g, unknown or other
nnnnnnnnnnnnnnnnnnnngttttagagctatgctgttttggaaacaaaacagcatagcaagttaaaataaggctagtccgttatcaacttgaaaaagtggcaccgagtcggtgc

SEQ ID NO: 30 - RNA, 116 nt, synthetic construct
  misc_feature 1..116: note = gRNA
  misc_feature 1..20: note = a, c, u, g, unknown or other
  misc_feature 1..20: note = targeting region
  misc_feature 21..42: note = first complementarity domain
  misc_feature 43..46: note = linking domain
  misc_feature 47..70: note = second complementarity domain
  source 1..116: mol_type = other RNA
nnnnnnnnnnnnnnnnnnnngtattagagctatgctgtattggaaacaatacagcatagcaagttaatataaggctagtccgttatcaacttgaaaaagtggcaccgagtcggtgc

SEQ ID NO: 31 - RNA, 96 nt, synthetic construct
  misc_feature 1..96: note = gRNA
  misc_feature 1..20: note = a, c, u, g, unknown or other
  misc_feature 1..20: note = targeting domain
  misc_feature 21..32: note = first complementarity domain
  misc_feature 33..36: note = linking domain
  misc_feature 37..50: note = second complementarity domain
  misc_feature 51..62: note = proximal domain
  source 1..96: mol_type = other RNA
nnnnnnnnnnnnnnnnnnnngtttaagagctagaaatagcaagtttaaataaggctagtccgttatcaacttgaaaaagtggcaccgagtcggtgc

SEQ ID NO: 32 - RNA, 47 nt, synthetic construct
  misc_feature 1..47: note = gRNA proximal and tail domains derived from S. pyogenes
  source 1..47: mol_type = other RNA
aaggctagtccgttatcaacttgaaaaagtggcaccgagtcggtgct

SEQ ID NO: 33 - RNA, 49 nt, synthetic construct
  misc_feature 1..49: note = gRNA proximal and tail domains
  source 1..49: mol_type = other RNA
aaggctagtccgttatcaacttgaaaaagtggcaccgagtcggtggtgc

SEQ ID NO: 34 - RNA, 51 nt, synthetic construct
  misc_feature 1..51: note = gRNA proximal and tail domains
  source 1..51: mol_type = other RNA
aaggctagtccgttatcaacttgaaaaagtggcaccgagtcggtgcggatc

SEQ ID NO: 35 - RNA, 31 nt, synthetic construct
  misc_feature 1..31: note = gRNA proximal and tail domains
  source 1..31: mol_type = other RNA
aaggctagtccgttatcaacttgaaaaagtg

SEQ ID NO: 36 - RNA, 18 nt, synthetic construct
  misc_feature 1..18: note = gRNA proximal and tail domains
  source 1..18: mol_type = other RNA
aaggctagtccgttatca

SEQ ID NO: 37 - RNA, 12 nt, synthetic construct
  misc_feature 1..12: note = gRNA proximal and tail domains
  source 1..12: mol_type = other RNA
aaggctagtccg

SEQ ID NO: 38 - RNA, 102 nt, synthetic construct
  misc_feature 1..102: note = Unimolecular gRNA derived from S. aureus
  misc_feature 1..20: note = n is a, c, g, or u
  misc_feature 1..20: note = Targeting domain
  source 1..102: mol_type = other RNA
nnnnnnnnnnnnnnnnnnnngttttagtactctggaaacagaatctactaaaacaaggcaaaatgccgtgtttatctcgtcaacttgttggcgagatttttt

SEQ ID NO: 39 - RNA, 42 nt, synthetic construct
  misc_feature 1..42: note = Modular gRNA derived from S. pyogenes
  misc_feature 1..20: note = a, c, u, g, unknown or other
  misc_feature 1..20: note = Targeting domain
  misc_feature 21..42: note = First complementarity domain
  source 1..42: mol_type = other RNA
nnnnnnnnnnnnnnnnnnnngttttagagctatgctgttttg

SEQ ID NO: 40 - RNA, 85 nt, synthetic construct
  misc_feature 1..85: note = Modular gRNA derived from S. pyogenes
  misc_feature 1..9: note = 5' extension domain
  misc_feature 10..33: note = Second complementarity domain
  misc_feature 34..45: note = Proximal domain
  misc_feature 46..85: note = Tail domain
  source 1..85: mol_type = other RNA
ggaaccattcaaaacagcatagcaagttaaaataaggctagtccgttatcaacttgaaaaagtggcaccgagtcggtgctttttt

SEQ ID NO: 41 - RNA, 62 nt, synthetic construct
  misc_feature 1..62: note = Unimolecular gRNA derived from S. pyogenes
  misc_feature 1..20: note = a, c, u, g, unknown or other
  misc_feature 1..20: note = Targeting domain
  misc_feature 21..32: note = First complementarity domain
  misc_feature 33..36: note = Linking domain
  misc_feature 37..50: note = Second complementarity domain
  misc_feature 51..62: note = Proximal domain
  source 1..62: mol_type = other RNA
nnnnnnnnnnnnnnnnnnnngttttagagctagaaatagcaagttaaaataaggctagtccg

SEQ ID NO: 42 - RNA, 102 nt, synthetic construct
  misc_feature 1..102: note = Unimolecular gRNA derived from S. pyogenes
  misc_feature 1..20: note = a, c, u, g, unknown or other
  misc_feature 1..20: note = Targeting domain
  misc_feature 21..32: note = First complementarity domain
  misc_feature 33..36: note = Linking domain
  misc_feature 37..50: note = Second complementarity domain
  misc_feature 51..62: note = Proximal domain
  misc_feature 63..102: note = Tail domain
  source 1..102: mol_type = other RNA
nnnnnnnnnnnnnnnnnnnngttttagagctagaaatagcaagttaaaataaggctagtccgttatcaacttgaaaaagtggcaccgagtcggtgctttttt

SEQ ID NO: 43 - RNA, 75 nt, synthetic construct
  misc_feature 1..75: note = Unimolecular gRNA derived from S. pyogenes
  misc_feature 1..20: note = Targeting domain
  misc_feature 1..20: note = a, c, u, g, unknown or other
  misc_feature 21..36: note = First complementarity domain
  misc_feature 37..40: note = Linking domain
  misc_feature 41..58: note = Second complementarity domain
  misc_feature 59..70: note = Proximal domain
  misc_feature 71..75: note = Tail domain
  source 1..75: mol_type = other RNA
nnnnnnnnnnnnnnnnnnnngttttagagctatgctgaaaagcatagcaagttaaaataaggctagtccgttatc

SEQ ID NO: 44 - RNA, 87 nt, synthetic construct
  misc_feature 1..87: note = Unimolecular gRNA derived from S. pyogenes
  misc_feature 1..20: note = a, c, u, g, unknown or other
  misc_feature 1..20: note = Targeting domain
  misc_feature 21..32: note = First complementarity domain
  misc_feature 43..46: note = Linking domain
  misc_feature 57..70: note = Second complementarity domain
  misc_feature 71..82: note = Proximal domain
  misc_feature 83..87: note = Tail domain
  source 1..87: mol_type = other RNA
nnnnnnnnnnnnnnnnnnnngttttagagctatgctgttttggaaacaaaacagcatagcaagttaaaataaggctagtccgttatc

SEQ ID NO: 45 - RNA, 42 nt, synthetic construct
  misc_feature 1..42: note = Modular gRNA derived from S. thermophilus
  misc_feature 1..20: note = a, c, u, g, unknown or other
  misc_feature 1..20: note = Targeting domain
  misc_feature 21..42: note = First complementarity domain
  source 1..42: mol_type = other RNA
nnnnnnnnnnnnnnnnnnnngttttagagctgtgttgtttcg

SEQ ID NO: 46 - RNA, 78 nt, synthetic construct
  misc_feature 1..78: note = Modular gRNA derived from S. thermophilus
  misc_feature 1..3: note = 5' extension domain
  misc_feature 4..27: note = Second complementarity domain
  misc_feature 28..40: note = Proximal domain
  misc_feature 41..78: note = Tail domain
  source 1..78: mol_type = other RNA
gggcgaaacaacacagcgagttaaaataaggcttagtccgtactcaacttgaaaaggtggcaccgattcggtgttttt

SEQ ID NO: 47 - RNA, 85 nt, synthetic construct
  misc_feature 1..85: note = Modular gRNA derived from S. pyogenes
  source 1..85: mol_type = other RNA
gaaccattcaaaacagcatagcaagttaaaataaggctagtccgttatcaacttgaaaaagtggcaccgagtcggtgcttttttt

SEQ ID NO: 48 - RNA, 96 nt, synthetic construct
  misc_feature 1..96: note = gRNA from S. pyogenes
  misc_feature 1..20: note = n is a, c, g, or u
  misc_feature 1..20: note = Targeting domain
  source 1..96: mol_type = other RNA
nnnnnnnnnnnnnnnnnnnngttttagagctagaaatagcaagttaaaataaggctagtccgttatcaacttgaaaaagtggcaccgagtcggtgc

SEQ ID NO: 49 - RNA, 96 nt, synthetic construct
  misc_feature 1..96: note = gRNA
  misc_feature 1..20: note = n is a, c, g, or u
  misc_feature 1..20: note = Targeting domain
  misc_feature 21..32: note = First complementarity domain
  misc_feature 33..36: note = Linking domain
  misc_feature 37..50: note = Second complementarity domain
  misc_feature 51..62: note = Proximal domain
  source 1..96: mol_type = other RNA
nnnnnnnnnnnnnnnnnnnngtattagagctagaaatagcaagttaatataaggctagtccgttatcaacttgaaaaagtggcaccgagtcggtgc

SEQ ID NO: 50 - RNA, 104 nt, synthetic construct
  misc_feature 1..104: note = gRNA
  misc_feature 1..20: note = n is a, c, g, or u
  misc_feature 1..20: note = Targeting domain
  misc_feature 21..36: note = First complementarity domain
  misc_feature 37..40: note = Linking domain
  misc_feature 41..58: note = Second complementarity domain
  source 1..104: mol_type = other RNA
nnnnnnnnnnnnnnnnnnnngttttagagctatgctgaaaagcatagcaagttaaaataaggctagtccgttatcaacttgaaaaagtggcaccgagtcggtgc

SEQ ID NO: 51 - RNA, 106 nt, synthetic construct
  misc_feature 1..106: note = gRNA
  misc_feature 1..20: note = n is a, c, g, or u
  misc_feature 1..20: note = Targeting domain
  misc_feature 21..37: note = First complementarity domain
  misc_feature 38..41: note = Linking domain
  misc_feature 42..60: note = Second complementarity domain
  source 1..106: mol_type = other RNA
nnnnnnnnnnnnnnnnnnnngttttagagctatgctggaaacagcatagcaagttaaaataaggctagtccgttatcaacttgaaaaagtggcaccgagtcggtgc

SEQ ID NO: 52 - protein, 12 aa, Peptoniphilus duerdenii
DIGTASVGWAVT

SEQ ID NO: 53 - protein, 12 aa, Treponema denticola
DVGTGSVGWAVT

SEQ ID NO: 54 - protein, 12 aa, Streptococcus mutans
DIGTNSVGWAVV

SEQ ID NO: 55 - protein, 12 aa, Streptococcus pyogenes
DIGTNSVGWAVI

SEQ ID NO: 56 - protein, 12 aa, Listeria innocua
DIGTNSVGWAVL

SEQ ID NO: 57 - protein, 12 aa, Flavobacterium branchiophilum
DLGTNSIGWAVV

SEQ ID NO: 58 - protein, 11 aa, Pedobacter glucosidilyticus
DLGTNSIGWAI

SEQ ID NO: 59 - protein, 12 aa, Bacteroides fragilis
DLGTNSIGWALV

SEQ ID NO: 60 - protein, 12 aa, Fusobacterium nucleatum
DIGTNSVGWCVT

SEQ ID NO: 61 - protein, 12 aa, Acidaminococcus sp.
DIGTNSVGYAVT

SEQ ID NO: 62 - protein, 12 aa, Coprococcus catus
DMGTGSLGWAVT

SEQ ID NO: 63 - protein, 12 aa, Oenococcus kitaharae
DIGTSSVGWAAI

SEQ ID NO: 64 - protein, 12 aa, Catenibacterium mitsuokai
DLGTGSVGWAVV

SEQ ID NO: 65 - protein, 12 aa, Mycoplasma gallisepticum
DLGVGSVGWAIV

SEQ ID NO: 66 - protein, 12 aa, Mycoplasma ovipneumoniae
DLGIASIGWAII

SEQ ID NO: 67 - protein, 12 aa, Mycoplasma canis
DLGIASVGWAIV

SEQ ID NO: 68 - protein, 12 aa, Mycoplasma synoviae
DLGVASVGWSIV

SEQ ID NO: 69 - protein, 12 aa, Eubacterium rectale
DIGIASVGWAIL

SEQ ID NO: 70 - protein, 12 aa, Enterococcus faecalis
DLGISSVGWSVI

SEQ ID NO: 71 - protein, 12 aa, Ilyobacter polytropus
DIGIASVGWSVI

SEQ ID NO: 72 - protein, 12 aa, Ruminococcus albus
DVGIGSIGWAVI

SEQ ID NO: 73 - protein, 12 aa, Elusimicrobium minutum
DLGVGSIGFAIV

SEQ ID NO: 74 - protein, 12 aa, Akkermansia muciniphila
DIGYASIGWAVI

SEQ ID NO: 75 - protein, 12 aa, Prevotella ruminicola
DTGTNSLGWAIV

SEQ ID NO: 76 - protein, 12 aa, synthetic construct
DLGTNSIGWCLL

SEQ ID NO: 77 - protein, 12 aa, Rhodospirillum rubrum
DIGTDSLGWAVF

SEQ ID NO: 78 - protein, 12 aa, Lactobacillus rhamnosus
DIGSNSIGFAVV

SEQ ID NO: 79 - protein, 12 aa, Sphaerochaeta globosa
DLGVGSIGVAVA

SEQ ID NO: 80 - protein, 12 aa, Rhodopseudomonas palustris
DLGIASCGWGVV

SEQ ID NO: 81 - protein, 12 aa, Mycoplasma mobile
DLGIASVGWCLT

SEQ ID NO: 82 - protein, 12 aa, Streptococcus thermophilus
DIGIGSVGVGIL

SEQ ID NO: 83 - protein, 12 aa, Staphylococcus lugdunensis
DIGITSVGYGLI

SEQ ID NO: 84 - protein, 12 aa, Eubacterium dolichum
DIGITSVGFGII

SEQ ID NO: 85 - protein, 12 aa, Lactobacillus coryniformis
DVGITSTGYAVL

SEQ ID NO: 86 - protein, 12 aa, Nitratifractor salsuginis
DLGITSFGYAIL

SEQ ID NO: 87 - protein, 12 aa, Bifidobacterium bifidum
DIGNASVGWSAF

SEQ ID NO: 88 - protein, 12 aa, Lactobacillus gasseri
DVGTNSCGWVAM

SEQ ID NO: 89 - protein, 12 aa, Acidothermus cellulolyticus
DVGERSIGLAAV

SEQ ID NO: 90 - protein, 12 aa, Bifidobacterium longum
DVGLNSVGLAAV

SEQ ID NO: 91 - protein, 12 aa, Bifidobacterium dentium
DVGLMSVGLAAI

SEQ ID NO: 92 - protein, 12 aa, Corynebacterium diphtheriae
DVGTFSVGLAAI

SEQ ID NO: 93 - protein, 12 aa, Staphylococcus pseudintermedius
DIGTGSVGYACM

SEQ ID NO: 94 - protein, 12 aa, Capnocytophaga ochracea
DLGTTSIGFAHI

SEQ ID NO: 95 - protein, 12 aa, Prevotella denticola
DLGTNSIGSSVR

SEQ ID NO: 96 - protein, 12 aa, Ralstonia solanacearum
DIGTNSIGWAVI

SEQ ID NO: 97 - protein, 12 aa, Pasteurella multocida
DLGIASVGWAVV

SEQ ID NO: 98 - protein, 12 aa, Comamonas granuli
DIGIASVGWAVL

SEQ ID NO: 99 - protein, 12 aa, Helicobacter mustelae
DIGIASIGWAVI

SEQ ID NO: 100 - protein, 12 aa, Agathobacter rectalis
DIGIASVGWAII

SEQ ID NO: 101 - protein, 12 aa, Clostridium cellulolyticum
DVGIASVGWAVI

SEQ ID NO: 102 - protein, 11 aa, Methylophilus sp.
DIGIASVGWAL

SEQ ID NO: 103 - protein, 12 aa, Neisseria meningitidis
DIGIASVGWAMV

SEQ ID NO: 104 - protein, 12 aa, Clostridium perfringens
DIGITSVGWAVI

SEQ ID NO: 105 - protein, 12 aa, Wolinella succinogenes
DLGISSLGWAIV

SEQ ID NO: 106 - protein, 12 aa, Azospirillum sp.
DLGTNSIGWGLL

SEQ ID NO: 107 - protein, 12 aa, Verminephrobacter eiseniae
DLGSTSLGWAIF

SEQ ID NO: 108 - protein, 12 aa, Campylobacter jejuni
DIGISSIGWAFS

SEQ ID NO: 109 - protein, 12 aa, Parvibaculum lavamentivorans
DIGTTSIGFSVI

SEQ ID NO: 110 - protein, 12 aa, Dinoroseobacter shibae
DIGTSSIGWWLY

SEQ ID NO: 111 - protein, 12 aa, Nitrobacter hamburgensis
DLGSNSLGWFVT

SEQ ID NO: 112 - protein, 12 aa, Bradyrhizobium sp.
DLGANSLGWFVV

SEQ ID NO: 113 - protein, 15 aa, Bacillus cereus
DIGLRIGITSCGWSI

SEQ ID NO: 114 - protein, 12 aa, Sutterella wadsworthensis
DMGAKYTGVFYA

SEQ ID NO: 115 - protein, 12 aa, Wolinella succinogenes
DLGGKNTGFFSF

SEQ ID NO: 116 - protein, 12 aa, Francisella tularensis
DLGVKNTGVFSA

SEQ ID NO: 117 - protein, 12 aa, synthetic construct
  source 1..12: note = gamma proteobacterium
DLGAKFTGVALY

SEQ ID NO: 118 - protein, 12 aa, Legionella pneumophila
DLGGKFTGVCLS

SEQ ID NO: 119 - protein, 12 aa, Parasutterella excrementihominis
DLGGTYTGTFIT

SEQ ID NO: 120 - protein, 12 aa, Streptococcus thermophilus
DIGTNSVGWAVT

SEQ ID NO: 121 - protein, 12 aa, Eubacterium yurii
DVGTNSVGWAVT

SEQ ID NO: 122 - protein, 12 aa, Butyrivibrio hungatei
DMGTNSVGWAVT

SEQ ID NO: 123 - protein, 12 aa, Solobacterium moorei
DVGTSSVGWAVT

SEQ ID NO: 124 - protein, 27 aa, Treponema denticola
DIDHIYPQSKIKDDSISNRVLVCSSCN

SEQ ID NO: 125 - protein, 27 aa, Coprococcus catus
DIDHIYPQSKTMDDSLNNRVLVKKNYN

SEQ ID NO: 126 - protein, 27 aa, Peptoniphilus duerdenii
DQDHIYPKSKIYDDSLENRVLVKKNLN

SEQ ID NO: 127 - protein, 27 aa, Catenibacterium mitsuokai
QIDHIVPQSLVKDDSFDNRVLVVPSEN

SEQ ID NO: 128 - protein, 27 aa, Streptococcus mutans
DIDHIIPQAFIKDNSIDNRVLTSSKEN

SEQ ID NO: 129 - protein, 27 aa, Streptococcus thermophilus
DIDHIIPQAFLKDNSIDNKVLVSSASN

SEQ ID NO: 130 - protein, 27 aa, Oenococcus kitaharae
DIDHIIPQAYTKDNSLDNRVLVSNITN

SEQ ID NO: 131 - protein, 27 aa, Listeria innocua
DIDHIVPQSFITDNSIDNLVLTSSAGN

SEQ ID NO: 132 - protein, 27 aa, Streptococcus pyogenes
DVDHIVPQSFLKDDSIDNKVLTRSDKN

SEQ ID NO: 133 - protein, 27 aa, Acidaminococcus sp.
NIDHIYPQSMVKDDSLDNKVLVQSEIN

SEQ ID NO: 134 - protein, 27 aa, Lactobacillus rhamnosus
DIDHILPQSLIKDDSLDNRVLVNATIN

SEQ ID NO: 135 - protein, 27 aa, Lactobacillus gasseri
DIDHILPQSFIKDDSLENRVLVKKAVN

SEQ ID NO: 136 - protein, 27 aa, Staphylococcus pseudintermedius
EVDHIFPRSFIKDDSIDNKVLVIKKMN

SEQ ID NO: 137 - protein, 27 aa, Olsenella uli
EVDHIIPRSYIKDDSFENKVLVYREEN

SEQ ID NO: 138 - protein, 27 aa, Bifidobacterium bifidum
DIDHIIPQAVTQNDSIDNRVLVARAEN

SEQ ID NO: 139 - protein, 27 aa, Mycoplasma gallisepticum
EIDHIIPYSISFDDSSSNKLLVLAESN

SEQ ID NO: 140 - protein, 27 aa, Mycoplasma canis
EIDHIIPYSLCFDDSSANKVLVHKQSN

SEQ ID NO: 141 - protein, 27 aa, Ilyobacter polytropus
DIDHIIPYSRSMDDSYSNKVLVLSGEN

SEQ ID NO: 142 - protein, 27 aa, synthetic construct
DIDHIIPYSKSMDDSFNNKVLCLAEEN

SEQ ID NO: 143 - protein, 27 aa, Campylobacter jejuni
EIDHIYPYSRSFDDSYMNKVLVFTKQN

SEQ ID NO: 144 - protein, 27 aa, Clostridium cellulolyticum
QIDHIYPYSRSMDDSYMNKVLVLTDEN

SEQ ID NO: 145 - protein, 27 aa, Clostridium perfringens
EIDHIIPFSRSFDDSLSNKILVLGSEN

SEQ ID NO: 146 - protein, 27 aa, Neisseria meningitidis
EIDHALPFSRTWDDSFNNKVLVLGSEN

SEQ ID NO: 147 - protein, 27 aa, Pasteurella multocida
EIDHALPFSRTWDDSFNNKVLVLASEN

SEQ ID NO: 148 - protein, 27 aa, Enterococcus faecalis
EIDHIIPISISLDDSINNKVLVLSKAN

SEQ ID NO: 149 - protein, 27 aa, Eubacterium dolichum
EVDHIIPISISLDDSITNKVLVTHREN

SEQ ID NO: 150 - protein, 27 aa, Acidovorax ebreus
QVDHALPYSRSYDDSKNNKVLVLTHEN

SEQ ID NO: 151 - protein, 27 aa, Streptococcus thermophilus
EVDHILPLSITFDDSLANKVLVYATAN

SEQ ID NO: 152 - protein, 27 aa, Eubacterium rectale
EIDHIIPRSISFDDARSNKVLVYRSEN

SEQ ID NO: 153 - protein, 27 aa, Staphylococcus lugdunensis
EVDHIIPRSVSFDNSYHNKVLVKQSEN

SEQ ID NO: 154 - protein, 27 aa, Roseburia intestinalis
DIDHILPYSITFDDSFRNKVLVTSQEN

SEQ ID NO: 155 - protein, 27 aa, Wolinella succinogenes
EIDHILPRSRSADDSFANKVLCLARAN

SEQ ID NO: 156 - protein, 27 aa, synthetic construct
EIEHLLPFSLTLDDSMANKTVCFRQAN

SEQ ID NO: 157 - protein, 27 aa, Azospirillum sp.
DIDHILPFSVSLDDSAANKVVCLREAN

SEQ ID NO: 158 - protein, 27 aa, Bradyrhizobium sp.
DIDHLIPFSISWDDSAANKVVCMRYAN

SEQ ID NO: 159 - protein, 27 aa, Nitrobacter hamburgensis
DIDHILPVAMTLDDSPANKIICMRYAN

SEQ ID NO: 160 - protein, 27 aa, Dinoroseobacter shibae
DVDHILPYSRTLDDSFPNRTLCLREAN

SEQ ID NO: 161 - protein, 27 aa, Verminephrobacter eiseniae
EIEHILPFSRTLDDSLNNRTVAMRRAN

SEQ ID NO: 162 - protein, 27 aa, Lactobacillus coryniformis
EVDHIIPYSISWDDSYTNKVLTSAKCN

SEQ ID NO: 163 - protein, 27 aa, Rhodopseudomonas palustris
QVDHILPWSRFGDDSYLNKTLCTARSN

SEQ ID NO: 164 - protein, 27 aa, Ralstonia syzygii
QVDHILPFSKTLDDSFANKVLAQHDAN

SEQ ID NO: 165 - protein, 27 aa, Helicobacter mustelae
QIDHAFPLSRSLDDSQSNKVLCLTSSN

SEQ ID NO: 166 - protein, 27 aa, Mycoplasma mobile
DIDHIVPRSISFDDSFSNLVIVNKLDN

SEQ ID NO: 167 - protein, 27 aa, Mycoplasma ovipneumoniae
EIEHIIPYSMSYDNSQANKILTEKAEN

SEQ ID NO: 168 - protein, 27 aa, Mycoplasma synoviae
EIDHVIPYSKSADDSWFNKLLVKKSTN

SEQ ID NO: 169 - protein, 27 aa, Aminomonas paucivorans
EMDHILPYSRSLDNGWHNRVLVHGKDN

SEQ ID NO: 170 - protein, 27 aa, Ruminococcus albus
EVDHIVPYSLILDNTINNKALVYAEEN

SEQ ID NO: 171 - protein, 27 aa, Fibrobacter succinogenes
EIEHVIPQSLYFDDSFSNKVICEAEVN

SEQ ID NO: 172 - protein, 27 aa, Bacteroides fragilis
DIEHIIPQARLFDDSFSNKTLEARSVN

SEQ ID NO: 173 - protein, 27 aa, Capnocytophaga sputigena
EIEHIVPKARVFDDSFSNKTLTFHRIN

SEQ ID NO: 174 - protein, 28 aa, Finegoldia magna
DKDHIIPQSMKKDDSIINNLVLVNKNAN

SEQ ID NO: 175 - protein, 27 aa, Parvibaculum lavamentivorans
EVEHIWPRSRSFDNSPRNKTLCRKDVN

SEQ ID NO: 176 - protein, 27 aa, Bacillus cereus
IVNHIIPYNRSFDDTYHNRVLTLTETK

SEQ ID NO: 177 - protein, 27 aa, Prevotella micans
DMEHTIPKSISFDNSDQNLTLCESYYN

SEQ ID NO: 178 - protein, 27 aa, Prevotella ruminicola
DIEHTIPRSAGGDSTKMNLTLCSSRFN

SEQ ID NO: 179 - protein, 27 aa, Flavobacterium columnare
DIEHTIPRSISQDNSQMNKTLCSLKFN

SEQ ID NO: 180 - protein, 27 aa, Rhodospirillum rubrum
DIDHVIPLARGGRDSLDNMVLCQSDAN

SEQ ID NO: 181 - protein, 27 aa, Elusimicrobium minutum
DIEHLFPIAESEDNGRNNLVISHSACN

SEQ ID NO: 182 - protein, 27 aa, Sphaerochaeta globosa
DVDHIFPRDDTADNSYGNKVVAHRQCN

SEQ ID NO: 183 - protein, 27 aa, Nitratifractor salsuginis
DIEHIVPQSLGGLSTDYNTIVTLKSVN

SEQ ID NO: 184 - protein, 27 aa, Acidothermus cellulolyticus
ELDHIVPRTDGGSNRHENLAITCGACN

SEQ ID NO: 185 - protein, 28 aa, Bifidobacterium longum
EMDHIVPRKGVGSTNTRTNFAAVCAECN

SEQ ID NO: 186 - protein, 28 aa, Bifidobacterium dentium
EMDHIVPRKGVGSTNTRVNLAAACAACN

SEQ ID NO: 187 - protein, 28 aa, Corynebacterium diphtheriae
EMDHIVPRAGQGSTNTRENLVAVCHRCN

SEQ ID NO: 188 - protein, 33 aa, Sutterella wadsworthensis
EIDHILPRSLIKDARGIVFNAEPNLIYASSRGN

SEQ ID NO: 189 - protein, 33 aa, synthetic construct
  source 1..33: note = gamma proteobacterium
EIDHIIPRSLTGRTKKTVFNSEANLIYCSSKGN

SEQ ID NO: 190 - protein, 33 aa, Parasutterella excrementihominis
EIDHIIPRSLTLKKSESIYNSEVNLIFVSAQGN

SEQ ID NO: 191 - protein, 33 aa, Legionella pneumophila
EIDHIYPRSLSKKHFGVIFNSEVNLIYCSSQGN

SEQ ID NO: 192 - protein, 33 aa, Wolinella succinogenes
EIDHILPRSHTLKIYGTVFNPEGNLIYVHQKCN

SEQ ID NO: 193 - protein, 30 aa, Francisella tularensis
ELDHIIPRSHKKYGTLNDEANLICVTRGDN

SEQ ID NO: 194 - protein, 27 aa, Akkermansia muciniphila
ELEHIVPHSFRQSNALSSLVLTWPGVN

SEQ ID NO: 195 - protein, 27 aa, Solobacterium moorei
DIDHIYPRSKIKDDSITNRVLVEKDIN

SEQ ID NO: 196 - protein, 28 aa, Veillonella atypica
YDIDHIYPRSLTKDDSFDNLVLCERTAN

SEQ ID NO: 197 - protein, 28 aa, Fusobacterium nucleatum
DIDHIYPRSKVIKDDSFDNLVLVLKNEN

SEQ ID NO: 198 - protein, 27 aa, Filifactor alocis
DRDHIYPQSKIKDDSIDNLVLVNKTYN

SEQ ID NO: 199-250 - skipped (52 entries)

SEQ ID NO: 251 - DNA, 1257 bp, Homo sapiens
  source 1..1257: mol_type = genomic DNA
  CDS 1..1257: note = Corresponds to NTs 9362-10008, 11459-11729, 12989-13136, and 13960-14151 of SEQ ID NO:2231
atgccgtcttctgtctcgtggggcatcctcctgctggcaggcctgtgctgcctggtccctgtctccctggctgaggatccccagggagatgctgcccagaagacagatacatcccaccatgatcaggatcacccaaccttcaacaagatcacccccaacctggctgagttcgccttcagcctataccgccagctggcacaccagtccaacagcaccaatatcttcttctccccagtgagcatcgctacagcctttgcaatgctctccctggggaccaaggctgacactcacgatgaaatcctggagggcctgaatttcaacctcacggagattccggaggctcagatccatgaaggcttccaggaactcctccgtaccctcaaccagccagacagccagctccagctgaccaccggcaatggcctgttcctcagcgagggcctgaagctagtggataagtttttggaggatgttaaaaagttgtaccactcagaagccttcactgtcaacttcggggacaccgaagaggccaagaaacagatcaacgattacgtggagaagggtactcaagggaaaattgtggatttggtcaaggagcttgacagagacacagtttttgctctggtgaattacatcttctttaaaggcaaatgggagagaccctttgaagtcaaggacaccgaggaagaggacttccacgtggaccaggtgaccaccgtgaaggtgcctatgatgaagcgtttaggcatgtttaacatccagcactgtaagaagctgtccagctgggtgctgctgatgaaatacctgggcaatgccaccgccatcttcttcctgcctgatgaggggaaactacagcacctggaaaatgaactcacccacgatatcatcaccaagttcctggaaaatgaagacagaaggtctgccagcttacatttacccaaactgtccattactggaacctatgatctgaagagcgtcctgggtcaactgggcatcactaaggtcttcagcaatggggctgacctctccggggtcacagaggaggcacccctgaagctctccaaggccgtgcataaggctgtgctgaccatcgacgagaaagggactgaagctgctggggccatgtttttagaggccatacccatgtctatcccccccgaggtcaagttcaacaaaccctttgtcttcttaatgattgaacaaaataccaagtctcccctcttcatgggaaaagtggtgaatcccacccaaaaataa

SEQ ID NO: 252 - protein, 418 aa, Homo sapiens
MPSSVSWGILLLAGLCCLVPVSLAEDPQGDAAQKTDTSHHDQDHPTFNKITPNLAEFAFSLYRQLAHQSNSTNIFFSPVSIATAFAMLSLGTKADTHDEILEGLNFNLTEIPEAQIHEGFQELLRTLNQPDSQLQLTTGNGLFLSEGLKLVDKFLEDVKKLYHSEAFTVNFGDTEEAKKQINDYVEKGTQGKIVDLVKELDRDTVFALVNYIFFKGKWERPFEVKDTEEEDFHVDQVTTVKVPMMKRLGMFNIQHCKKLSSWVLLMKYLGNATAIFFLPDEGKLQHLENELTHDIITKFLENEDRRSASLHLPKLSITGTYDLKSVLGQLGITKVFSNGADLSGVTEEAPLKLSKAVHKAVLTIDEKGTEAAGAMFLEAIPMSIPPEVKFNKPFVFLMIEQNTKSPLFMGKVVNPTQK

SEQ ID NO: 253 - RNA, 20 nt, synthetic construct
  misc_feature 1..20: note = Targeting Domain
  source 1..20: mol_type = other RNA
gggtatggcctctaaaaaca

SEQ ID NO: 254 - RNA, 20 nt, synthetic construct
  misc_feature 1..20: note = Targeting Domain
  source 1..20: mol_type = other RNA
gacctcgggggggatagaca

SEQ ID NO: 255 - RNA, 20 nt, synthetic construct
  misc_feature 1..20: note = Targeting Domain
  source 1..20: mol_type = other RNA
ggagcaaggcctatgtgaca

SEQ ID NO: 256 - RNA, 20 nt, synthetic construct
  misc_feature 1..20: note = Targeting Domain
  source 1..20: mol_type = other RNA
ggtcagcacagccttatgca

SEQ ID NO: 257 - RNA, 20 nt, synthetic construct
  misc_feature 1..20: note = Targeting Domain
  source 1..20: mol_type = other RNA
gcacagccttatgcacggcc

SEQ ID NO: 258 - RNA, 20 nt, synthetic construct
  misc_feature 1..20: note = Targeting Domain
  source 1..20: mol_type = other RNA
gccttatgcacggcctggag

SEQ ID NO: 259 - RNA, 20 nt, synthetic construct
  misc_feature 1..20: note = Targeting Domain
  source 1..20: mol_type = other RNA
ggcctcgagcaaggctcacg

SEQ ID NO: 260 - RNA, 20 nt, synthetic construct
  misc_feature 1..20: note = Targeting Domain
  source 1..20: mol_type = other RNA
gtttgttgaacttgacctcg

SEQ ID NO: 261 - RNA, 20 nt, synthetic construct
  misc_feature 1..20: note = Targeting Domain
  source 1..20: mol_type = other RNA
gcaaggcctatgtgacaggg

SEQ ID NO: 262 - RNA, 20 nt, synthetic construct
  misc_feature 1..20: note = Targeting Domain
  source 1..20: mol_type = other RNA
gagcgagaggcagttatttt

SEQ ID NO: 263 - RNA, 20 nt, synthetic construct
  misc_feature 1..20: note = Targeting Domain
  source 1..20: mol_type = other RNA
ctgatcccaggcctcgagca

SEQ ID NO: 264 - RNA, 20 nt, synthetic construct
  misc_feature 1..20: note = Targeting Domain
  source 1..20: mol_type = other RNA
ataggccttgctcctcctca

SEQ ID NO: 265 - RNA, 20 nt, synthetic construct
  misc_feature 1..20: note = Targeting Domain
  source 1..20: mol_type = other RNA
agccttatgcacggcctgga

SEQ ID NO: 266 - RNA, 20 nt, synthetic construct
  misc_feature 1..20: note = Targeting Domain
  source 1..20: mol_type = other RNA
tcccctccaggccgtgcata

SEQ ID NO: 267 - RNA, 20 nt, synthetic construct
  misc_feature 1..20: note = Targeting Domain
  source 1..20: mol_type = other RNA
agaagcagagacacgttgta

SEQ ID NO: 268 - RNA, 20 nt, synthetic construct
  misc_feature 1..20: note = Targeting Domain
  source 1..20: mol_type = other RNA
aggagcaaggcctatgtgac

SEQ ID NO: 269 - RNA, 20 nt, synthetic construct
  misc_feature 1..20: note = Targeting Domain
  source 1..20: mol_type = other RNA
cacgttgtaaggctgatccc

SEQ ID NO: 270 - RNA, 20 nt, synthetic construct
  misc_feature 1..20: note = Targeting Domain
  source 1..20: mol_type = other RNA
acccatgtctatcccccccg

SEQ ID NO: 271 - RNA, 20 nt, synthetic construct
  misc_feature 1..20: note = Targeting Domain
  source 1..20: mol_type = other RNA
tttgttgaacttgacctcgg

SEQ ID NO: 272 - RNA, 20 nt, synthetic construct
  misc_feature 1..20: note = Targeting Domain
  source 1..20: mol_type = other RNA
ttgttgaacttgacctcggg

SEQ ID NO: 273 - RNA, 20 nt, synthetic construct
  misc_feature 1..20: note = Targeting Domain
  source 1..20: mol_type = other RNA
tgttgaacttgacctcgggg

SEQ ID NO: 274 - RNA, 20 nt, synthetic construct
  misc_feature 1..20: note = Targeting Domain
  source 1..20: mol_type = other RNA
cagccttatgcacggcctgg

SEQ ID NO: 275 - RNA, 20 nt, synthetic construct
  misc_feature 1..20: note = Targeting Domain
  source 1..20: mol_type = other RNA
acctcgggggggatagacat

SEQ ID NO: 276 - RNA, 17 nt, synthetic construct
  misc_feature 1..17: note = Targeting Domain
  source 1..17: mol_type = other RNA
gcaaggcctatgtgaca

SEQ ID NO: 277 - RNA, 17 nt, synthetic construct
  misc_feature 1..17: note = Targeting Domain
  source 1..17: mol_type = other RNA
gaggatgtgcagggcca

SEQ ID NO: 278 - RNA, 17 nt, synthetic construct
  misc_feature 1..17: note = Targeting Domain
  source 1..17: mol_type = other RNA
gagggagaggatgtgca

SEQ ID NO: 279 - RNA, 17 nt, synthetic construct
  misc_feature 1..17: note = Targeting Domain
  source 1..17: mol_type = other RNA
ggccttgctcctcctca

SEQ ID NO: 280 - RNA, 17 nt, synthetic construct
  misc_feature 1..17: note = Targeting Domain
  source 1..17: mol_type = other RNA
ggcctatgtgacaggga

SEQ ID NO: 281 - RNA, 17 nt, synthetic construct
  misc_feature 1..17: note = Targeting Domain
  source 1..17: mol_type = other RNA
gccagggatggagggga

SEQ ID NO: 282 - RNA, 17 nt, synthetic construct
  misc_feature 1..17: note = Targeting Domain
  source 1..17: mol_type = other RNA
ggggatagacatgggta

SEQ ID NO: 283 - RNA, 17 nt, synthetic construct
  misc_feature 1..17: note = Targeting Domain
  source 1..17: mol_type = other RNA
gaagcgctcactccccc

SEQ ID NO: 284 - RNA, 17 nt, synthetic construct
  misc_feature 1..17: note = Targeting Domain
  source 1..17: mol_type = other RNA
gttgtaaggctgatccc

SEQ ID NO: 285 - RNA, 17 nt, synthetic construct
  misc_feature 1..17: note = Targeting Domain
  source 1..17: mol_type = other RNA
gagccttgctcgaggcc

SEQ ID NO: 286 - RNA, 17 nt, synthetic construct
  misc_feature 1..17: note = Targeting Domain
  source 1..17: mol_type = other RNA
ggggagtgagcgcttcc

SEQ ID NO: 287 - RNA, 17 nt, synthetic construct
  misc_feature 1..17: note = Targeting Domain
  source 1..17: mol_type = other RNA
ggagggagaggatgtgc

SEQ ID NO: 288 - RNA, 17 nt, synthetic construct
  misc_feature 1..17: note = Targeting Domain
  source 1..17: mol_type = other RNA
gggccagggccgtccag

SEQ ID NO: 289 - RNA, 17 nt, synthetic construct
  misc_feature 1..17: note = Targeting Domain
  source 1..17: mol_type = other RNA
ggccagggccgtccagg

SEQ ID NO: 290 - RNA, 17 nt, synthetic construct
  misc_feature 1..17: note = Targeting Domain
  source 1..17: mol_type = other RNA
gttgaacttgacctcgg

SEQ ID NO: 291 - RNA, 17 nt, synthetic construct
  misc_feature 1..17: note = Targeting Domain
  source 1..17: mol_type = other RNA
gggagtgagcgcttcct

SEQ ID NO: 292 - RNA, 17 nt, synthetic construct
  misc_feature 1..17: note = Targeting Domain
  source 1..17: mol_type = other RNA
ggcagttatttttgggt

SEQ ID NO: 293 - RNA, 17 nt, synthetic construct
  misc_feature 1..17: note = Targeting Domain
  source 1..17: mol_type = other RNA
gctcctcctcaaggctt

SEQ ID NO: 294 - RNA, 17 nt, synthetic construct
  misc_feature 1..17: note = Targeting Domain
  source 1..17: mol_type = other RNA
gagaggcagttattttt

SEQ ID NO: 295 - RNA, 20 nt, synthetic construct
  misc_feature 1..20: note = Targeting Domain
  source 1..20: mol_type = other RNA
gtgctgaccatcgacaagaa

SEQ ID NO: 296 - RNA, 20 nt, synthetic construct
  misc_feature 1..20: note = Targeting Domain
  source 1..20: mol_type = other RNA
ggagaggatgtgcagggcca

SEQ ID NO: 297 - RNA, 20 nt, synthetic construct
  misc_feature 1..20: note = Targeting Domain
  source 1..20: mol_type = other RNA
gggggggatagacatgggta

SEQ ID NO: 298 - RNA, 20 nt, synthetic construct
  misc_feature 1..20: note = Targeting Domain
  source 1..20: mol_type = other RNA
ggctcacgtggacacctccc

SEQ ID NO: 299 - RNA, 20 nt, synthetic construct
  misc_feature 1..20: note = Targeting Domain
  source 1..20: mol_type = other RNA
gggagaggatgtgcagggcc

SEQ ID NO: 300 - RNA, 20 nt, synthetic construct
  misc_feature 1..20: note = Targeting Domain
  source 1..20: mol_type = other RNA
gtgcagggccagggccgtcc

SEQ ID NO: 301 - RNA, 20 nt, synthetic construct
  misc_feature 1..20: note = Targeting Domain
  source 1..20: mol_type = other RNA
ggtttgttgaacttgacctc

SEQ ID NO: 302 - RNA, 20 nt, synthetic construct
  misc_feature 1..20: note = Targeting Domain
  source 1..20: mol_type = other RNA
gcagggccagggccgtccag

SEQ ID NO: 303 - RNA, 20 nt, synthetic construct
  misc_feature 1..20: note = Targeting Domain
  source 1..20: mol_type = other RNA
gggaggggttgaggagcgag

SEQ ID NO: 304 - RNA, 20 nt, synthetic construct
  misc_feature 1..20: note = Targeting Domain
  source 1..20: mol_type = other RNA
gtccacgtgagccttgctcg

SEQ ID NO: 305 - RNA, 20 nt, synthetic construct
  misc_feature 1..20: note = Targeting Domain
  source 1..20: mol_type = other RNA
gggagtgagcgcttcctggg

SEQ ID NO: 306 - RNA, 20 nt, synthetic construct
  misc_feature 1..20: note = Targeting Domain
  source 1..20: mol_type = other RNA
gagaggcagttatttttggg

SEQ ID NO: 307 - RNA, 20 nt, synthetic construct
  misc_feature 1..20: note = Targeting Domain
  source 1..20: mol_type = other RNA
gaaagggactgaagctgctg

SEQ ID NO: 308 - RNA, 20 nt, synthetic construct
  misc_feature 1..20: note = Targeting Domain
  source 1..20: mol_type = other RNA
gggatggaggggaggggttg

SEQ ID NO: 309 - RNA, 20 nt, synthetic construct
  misc_feature 1..20: note = Targeting Domain
  source 1..20: mol_type = other RNA
gggtttgttgaacttgacct

SEQ ID NO: 310 - RNA, 20 nt, synthetic construct
  misc_feature 1..20: note = Targeting Domain
  source 1..20: mol_type = other RNA
gtgagccttgctcgaggcct

SEQ ID NO: 311 - RNA, 17 nt, synthetic construct
  misc_feature 1..17: note = Targeting Domain
  source 1..17: mol_type = other RNA
atcattaagaagacaaa

SEQ ID NO: 312 - RNA, 17 nt, synthetic construct
  misc_feature 1..17: note = Targeting Domain
  source 1..17: mol_type = other RNA
tgaccatcgacaagaaa

SEQ ID NO: 313 - RNA, 17 nt, synthetic construct
  misc_feature 1..17: note = Targeting Domain
  source 1..17: mol_type = other RNA
aatcattaagaagacaa

SEQ ID NO: 314 - RNA, 17 nt, synthetic construct
  misc_feature 1..17: note = Targeting Domain
  source 1..17: mol_type = other RNA
ctgaccatcgacaagaa

SEQ ID NO: 315 - RNA, 17 nt, synthetic construct
  misc_feature 1..17: note = Targeting Domain
  source 1..17: mol_type = other RNA
tatggcctctaaaaaca

SEQ ID NO: 316 - RNA, 17 nt, synthetic construct
  misc_feature 1..17: note = Targeting Domain
  source 1..17: mol_type = other RNA
ctcgggggggatagaca

SEQ ID NO: 317 - RNA, 17 nt, synthetic construct
  misc_feature 1..17: note = Targeting Domain
  source 1..17: mol_type = other RNA
agggccagggccgtcca

SEQ ID NO: 318 - RNA, 17 nt, synthetic construct
  misc_feature 1..17: note = Targeting Domain
  source 1..17: mol_type = other RNA
atcccaggcctcgagca

SEQ ID NO: 319 - RNA, 17 nt, synthetic construct
  misc_feature 1..17: note = Targeting Domain
  source 1..17: mol_type = other RNA
agccttgaggaggagca

SEQ ID NO: 320 - RNA, 17 nt, synthetic construct
  misc_feature 1..17: note = Targeting Domain
  source 1..17: mol_type = other RNA
cagcacagccttatgca

SEQ ID NO: 321 - RNA, 17 nt, synthetic construct
  misc_feature 1..17: note = Targeting Domain
  source 1..17: mol_type = other RNA
caagtctcccctcttca

SEQ ID NO: 322 - RNA, 17 nt, synthetic construct
  misc_feature 1..17: note = Targeting Domain
  source 1..17: mol_type = other RNA
cacttttcccatgaaga

SEQ ID NO: 323 - RNA, 17 nt, synthetic construct
  misc_feature 1..17: note = Targeting Domain
  source 1..17: mol_type = other RNA
agtccctttcttgtcga

SEQ ID NO: 324 - RNA, 17 nt, synthetic construct
  misc_feature 1..17: note = Targeting Domain
  source 1..17: mol_type = other RNA
cgctcactccccctgga

SEQ ID NO: 325 - RNA, 17 nt, synthetic construct
  misc_feature 1..17: note = Targeting Domain
  source 1..17: mol_type = other RNA
cttatgcacggcctgga

SEQ ID NO: 326 - RNA, 17 nt, synthetic construct
  misc_feature 1..17: note = Targeting Domain
  source 1..17: mol_type = other RNA
cctccaggccgtgcata

SEQ ID NO: 327 - RNA, 17 nt, synthetic construct
  misc_feature 1..17: note = Targeting Domain
  source 1..17: mol_type = other RNA
agcagagacacgttgta

SEQ ID NO: 328 - RNA, 17 nt, synthetic construct
  misc_feature 1..17: note = Targeting Domain
  source 1..17: mol_type = other RNA
agcaaggcctatgtgac

SEQ ID NO: 329 - RNA, 17 nt, synthetic construct
  misc_feature 1..17: note = Targeting Domain
  source 1..17: mol_type = other RNA
ctccccctggacggccc

SEQ ID NO: 330 - RNA, 17 nt, synthetic construct
  misc_feature 1..17: note = Targeting Domain
  source 1..17: mol_type = other RNA
cccctcccctccatccc

SEQ ID NO: 331 - RNA, 17 nt, synthetic construct
  misc_feature 1..17: note = Targeting Domain
  source 1..17: mol_type = other RNA
tcacgtggacacctccc

SEQ ID NO: 332 - RNA, 17 nt, synthetic construct
  misc_feature 1..17: note = Targeting Domain
  source 1..17: mol_type = other RNA
cagccttatgcacggcc

SEQ ID NO: 333 - RNA, 17 nt, synthetic construct
  misc_feature 1..17: note = Targeting Domain
  source 1..17: mol_type = other RNA
agaggatgtgcagggcc

SEQ ID NO: 334 - RNA, 17 nt, synthetic construct
  misc_feature 1..17: note = Targeting Domain
  source 1..17: mol_type = other RNA
ctgcttctctcccctcc

SEQ ID NO: 335 - RNA, 17 nt, synthetic construct
  misc_feature 1..17: note = Targeting Domain
  source 1..17: mol_type = other RNA
cagggccagggccgtcc

SEQ ID NO: 336 - RNA, 17 nt, synthetic construct
  misc_feature 1..17: note = Targeting Domain
  source 1..17: mol_type = other RNA
aaagggactgaagctgc

SEQ ID NO: 337 - RNA, 17 nt, synthetic construct
  misc_feature 1..17: note = Targeting Domain
  source 1..17: mol_type = other RNA
ttgttgaacttgacctc

SEQ ID NO: 338 - RNA, 17 nt, synthetic construct
  misc_feature 1..17: note = Targeting Domain
  source 1..17: mol_type = other RNA
cctcttcatgggaaaag

SEQ ID NO: 339 - RNA, 17 nt, synthetic construct
  misc_feature 1..17: note = Targeting Domain
  source 1..17: mol_type = other RNA
ccacttttcccatgaag

SEQ ID NO: 340 - RNA, 17 nt, synthetic construct
  misc_feature 1..17: note = Targeting Domain
  source 1..17: mol_type = other RNA
acttttcccatgaagag

SEQ ID NO: 341 - RNA, 17 nt, synthetic construct
  misc_feature 1..17: note = Targeting Domain
  source 1..17: mol_type = other RNA
aggggttgaggagcgag

SEQ ID NO: 342 - RNA, 17 nt, synthetic construct
  misc_feature 1..17: note = Targeting Domain
  source 1..17: mol_type = other RNA
atgtgacagggagggag

SEQ ID NO: 343 - RNA, 17 nt, synthetic construct
  misc_feature 1..17: note = Targeting Domain
  source 1..17: mol_type = other RNA
ccagggatggaggggag

SEQ ID NO: 344 - RNA, 17 nt, synthetic construct
  misc_feature 1..17: note = Targeting Domain
  source 1..17: mol_type = other RNA
ttatgcacggcctggag

SEQ ID NO: 345 - RNA, 17 nt, synthetic construct
  misc_feature 1..17: note = Targeting Domain
  source 1..17: mol_type = other RNA
tggggccatgtttttag

SEQ ID NO: 346 - RNA, 17 nt, synthetic construct
  misc_feature 1..17: note = Targeting Domain
  source 1..17: mol_type = other RNA
ctcgagcaaggctcacg

SEQ ID NO: 347 - RNA, 17 nt, synthetic construct
  misc_feature 1..17: note = Targeting Domain
  source 1..17: mol_type = other RNA
catgtctatcccccccg

SEQ ID NO: 348 - RNA, 17 nt, synthetic construct
  misc_feature 1..17: note = Targeting Domain
  source 1..17: mol_type = other RNA
tgttgaacttgacctcg

SEQ ID NO: 349 - RNA, 17 nt, synthetic construct
  misc_feature 1..17: note = Targeting Domain
  source 1..17: mol_type = other RNA
cacgtgagccttgctcg

SEQ ID NO: 350 - RNA, 17 nt, synthetic construct
  misc_feature 1..17: note = Targeting Domain
  source 1..17: mol_type = other RNA
cagccaaagccttgagg

SEQ ID NO: 351 - RNA, 17 nt, synthetic construct
  misc_feature 1..17: note = Targeting Domain
  source 1..17: mol_type = other RNA
aggcctatgtgacaggg

SEQ ID NO: 352 - RNA, 17 nt, synthetic construct
  misc_feature 1..17: note = Targeting Domain
  source 1..17: mol_type = other RNA
ttgaacttgacctcggg

SEQ ID NO: 353 - RNA, 17 nt, synthetic construct
  misc_feature 1..17: note = Targeting Domain
  source 1..17: mol_type = other RNA
tgaacttgacctcgggg

SEQ ID NO: 354 - RNA, 17 nt, synthetic construct
  misc_feature 1..17: note = Targeting Domain
  source 1..17: mol_type = other RNA
agtgagcgcttcctggg

SEQ ID NO: 355 - RNA, 17 nt, synthetic construct
  misc_feature 1..17: note = Targeting Domain
  source 1..17: mol_type = other RNA
aggcagttatttttggg

SEQ ID NO: 356 - RNA, 17 nt, synthetic construct
  misc_feature 1..17: note = Targeting Domain
  source 1..17: mol_type = other RNA
ccttatgcacggcctgg

SEQ ID NO: 357 - RNA, 17 nt, synthetic construct
  misc_feature 1..17: note = Targeting Domain
  source 1..17: mol_type = other RNA
agggactgaagctgctg

SEQ ID NO: 358 - RNA, 17 nt, synthetic construct
  misc_feature 1..17: note = Targeting Domain
  source 1..17: mol_type = other RNA
catcagccaaagccttg

SEQ ID NO: 359 - RNA, 17 nt, synthetic construct
  misc_feature 1..17: note = Targeting Domain
  source 1..17: mol_type = other RNA
atggaggggaggggttg

SEQ ID NO: 360 - RNA, 17 nt, synthetic construct
  misc_feature 1..17: note = Targeting Domain
  source 1..17: mol_type = other RNA
ctccctccctgtcacat

SEQ ID NO: 361 - RNA, 17 nt, synthetic construct
  misc_feature 1..17: note = Targeting Domain
  source 1..17: mol_type = other RNA
tcgggggggatagacat

SEQ ID NO: 362 - RNA, 17 nt, synthetic construct
  misc_feature 1..17: note = Targeting Domain
  source 1..17: mol_type = other RNA
aagtctcccctcttcat

SEQ ID NO: 363 - RNA, 17 nt, synthetic construct
  misc_feature 1..17: note = Targeting Domain
  source 1..17: mol_type = other RNA
catgaagaggggagact

SEQ ID NO: 364 - RNA, 17 nt, synthetic construct
  misc_feature 1..17: note = Targeting Domain
  source 1..17: mol_type = other RNA
tttgttgaacttgacct

SEQ ID NO: 365 - RNA, 17 nt, synthetic construct
  misc_feature 1..17: note = Targeting Domain
  source 1..17: mol_type = other RNA
agccttgctcgaggcct

SEQ ID NO: 366 - RNA, 17 nt, synthetic construct
  misc_feature 1..17: note = Targeting Domain
  source 1..17: mol_type = other RNA
aagggactgaagctgct

SEQ ID NO: 367 - RNA, 17 nt, synthetic construct
  misc_feature 1..17: note = Targeting Domain
  source 1..17: mol_type = other RNA
cgagaggcagttatttt

SEQ ID NO: 368 - RNA, 20 nt, synthetic construct
  misc_feature 1..20: note = Targeting Domain
  source 1..20: mol_type = other RNA
tcaatcattaagaagacaaa

SEQ ID NO: 369 - RNA, 20 nt, synthetic construct
  misc_feature 1..20: note = Targeting Domain
  source 1..20: mol_type = other RNA
tgctgaccatcgacaagaaa

SEQ ID NO: 370 - RNA, 20 nt, synthetic construct
  misc_feature 1..20: note = Targeting Domain
  source 1..20: mol_type = other RNA
ttcaatcattaagaagacaa

SEQ ID NO: 371 - RNA, 20 nt, synthetic construct
  misc_feature 1..20: note = Targeting Domain
  source 1..20: mol_type = other RNA
tgcagggccagggccgtcca

SEQ ID NO: 372 - RNA, 20 nt, synthetic construct
  misc_feature 1..20: note = Targeting Domain
  source 1..20: mol_type = other RNA
caaagccttgaggaggagca

SEQ ID NO: 373 - RNA, 20 nt, synthetic construct
  misc_feature 1..20: note = Targeting Domain
  source 1..20: mol_type = other RNA
agggagggagaggatgtgca

SEQ ID NO: 374 - RNA, 20 nt, synthetic construct
  misc_feature 1..20: note = Targeting Domain
  source 1..20: mol_type = other RNA
taccaagtctcccctcttca

SEQ ID NO: 375 - RNA, 20 nt, synthetic construct
  misc_feature 1..20: note = Targeting Domain
  source 1..20: mol_type = other RNA
caccacttttcccatgaaga

SEQ ID NO: 376 - RNA, 20 nt, synthetic construct
  misc_feature 1..20: note = Targeting Domain
  source 1..20: mol_type = other RNA
ttcagtccctttcttgtcga

SEQ ID NO: 377 - RNA, 20 nt, synthetic construct
  misc_feature 1..20: note = Targeting Domain
  source 1..20: mol_type = other RNA
caaggcctatgtgacaggga

SEQ ID NO: 378 - RNA, 20 nt, synthetic construct
  misc_feature 1..20: note = Targeting Domain
  source 1..20: mol_type = other RNA
aagcgctcactccccctgga

SEQ ID NO: 379 - RNA, 20 nt, synthetic construct
  misc_feature 1..20: note = Targeting Domain
  source 1..20: mol_type = other RNA
caggaagcgctcactccccc

SEQ ID NO: 380 - RNA, 20 nt, synthetic construct
  misc_feature 1..20: note = Targeting Domain
  source 1..20: mol_type = other RNA
tcactccccctggacggccc

SEQ ID NO: 381 - RNA, 20 nt, synthetic construct
  misc_feature 1..20: note = Targeting Domain
  source 1..20: mol_type = other RNA
caacccctcccctccatccc

SEQ ID NO: 382 - RNA, 20 nt, synthetic construct
  misc_feature 1..20: note = Targeting Domain
  source 1..20: mol_type = other RNA
cgtgagccttgctcgaggcc

SEQ ID NO: 383 - RNA, 20 nt, synthetic construct
  misc_feature 1..20: note = Targeting Domain
  source 1..20: mol_type = other RNA
tctctgcttctctcccctcc

SEQ ID NO: 384 - RNA, 20 nt, synthetic construct
  misc_feature 1..20: note = Targeting Domain
  source 1..20: mol_type = other RNA
cagggggagtgagcgcttcc

SEQ ID NO: 385 - RNA, 20 nt, synthetic construct
  misc_feature 1..20: note = Targeting Domain
  source 1..20: mol_type = other RNA
aagaaagggactgaagctgc

SEQ ID NO: 386 - RNA, 20 nt, synthetic construct
  misc_feature 1..20: note = Targeting Domain
  source 1..20: mol_type = other RNA
cagggagggagaggatgtgc

SEQ ID NO: 387 - RNA, 20 nt, synthetic construct
  misc_feature 1..20: note = Targeting Domain
  source 1..20: mol_type = other RNA
tcccctcttcatgggaaaag

SEQ ID NO: 388 - RNA, 20 nt, synthetic construct
  misc_feature 1..20: note = Targeting Domain
  source 1..20: mol_type = other RNA
tcaccacttttcccatgaag

SEQ ID NO: 389 - RNA, 20 nt, synthetic construct
  misc_feature 1..20: note = Targeting Domain
  source 1..20: mol_type = other RNA
accacttttcccatgaagag

SEQ ID NO: 390 - RNA, 20 nt, synthetic construct
  misc_feature 1..20: note = Targeting Domain
  source 1..20: mol_type = other RNA
cctatgtgacagggagggag

SEQ ID NO: 391 - RNA, 20 nt, synthetic construct
  misc_feature 1..20: note = Targeting Domain
  source 1..20: mol_type = other RNA
tgctggggccatgtttttag

SEQ ID NO: 392 - RNA, 20 nt, synthetic construct
  misc_feature 1..20: note = Targeting Domain
  source 1..20: mol_type = other RNA
cagggccagggccgtccagg

SEQ ID NO: 393 - RNA, 20 nt, synthetic construct
  misc_feature 1..20: note = Targeting Domain
  source 1..20: mol_type = other RNA
catcagccaaagccttgagg

SEQ ID NO: 394 - RNA, 20 nt, synthetic construct
  misc_feature 1..20: note = Targeting Domain
  source 1..20: mol_type = other RNA
cctctccctccctgtcacat

SEQ ID NO: 395 - RNA, 20 nt, synthetic construct
  misc_feature 1..20: note = Targeting Domain
  source 1..20: mol_type = other RNA
accaagtctcccctcttcat

SEQ ID NO: 396 - RNA, 20 nt, synthetic construct
  misc_feature 1..20: note = Targeting Domain
  source 1..20: mol_type = other RNA
tcccatgaagaggggagact

SEQ ID NO: 397 - RNA, 20 nt, synthetic construct
  misc_feature 1..20: note = Targeting Domain
  source 1..20: mol_type = other RNA
agggggagtgagcgcttcct

SEQ ID NO: 398 - RNA, 20 nt, synthetic construct
  misc_feature 1..20: note = Targeting Domain
  source 1..20: mol_type = other RNA
agaaagggactgaagctgct

SEQ ID NO: 399 - RNA, 20 nt, synthetic construct
  misc_feature 1..20: note = Targeting Domain
  source 1..20: mol_type = other RNA
agaggcagttatttttgggt

SEQ ID NO: 400 - RNA, 20 nt, synthetic construct
  misc_feature 1..20: note = Targeting Domain
  source 1..20: mol_type = other RNA
cttgctcctcctcaaggctt

SEQ ID NO: 401 - RNA, 20 nt, synthetic construct
  misc_feature 1..20: note = Targeting Domain
  source 1..20: mol_type = other RNA
agcgagaggcagttattttt

SEQ ID NO: 402 - RNA, 19 nt, synthetic construct
  misc_feature 1..19: note = Targeting Domain
  source 1..19: mol_type = other RNA
gacctcgggggggatagac

SEQ ID NO: 403 - RNA, 18 nt, synthetic construct
  misc_feature 1..18: note = Targeting Domain
  source 1..18: mol_type = other RNA
gttgaacttgacctcggg

SEQ ID NO: 404 - RNA, 22 nt, synthetic construct
  misc_feature 1..22: note = Targeting Domain
  source 1..22: mol_type = other RNA
gtttgttgaacttgacctcggg

SEQ ID NO: 405 - RNA, 23 nt, synthetic construct
  misc_feature 1..23: note = Targeting Domain
  source 1..23: mol_type = other RNA
ggtttgttgaacttgacctcggg

SEQ ID NO: 406 - RNA, 24 nt, synthetic construct
  misc_feature 1..24: note = Targeting Domain
  source 1..24: mol_type = other RNA
gggtttgttgaacttgacctcggg

SEQ ID NO: 407 - RNA, 22 nt, synthetic construct
  misc_feature 1..22: note = Targeting Domain
  source 1..22: mol_type = other RNA
gcgagaggcagttatttttggg

SEQ ID NO: 408 - RNA, 24 nt, synthetic construct
  misc_feature 1..24: note = Targeting Domain
  source 1..24: mol_type = other RNA
gagcgagaggcagttatttttggg

SEQ ID NO: 409 - RNA, 22 nt, synthetic construct
  misc_feature 1..22: note = Targeting Domain
  source 1..22: mol_type = other RNA
gaggagcgagaggcagttattt

SEQ ID NO: 410 - RNA, 21 nt, synthetic construct
  misc_feature 1..21: note = Targeting Domain
  source 1..21: mol_type = other RNA
ggcctatgtgacagggaggga

SEQ ID NO: 411 - RNA, 21 nt, synthetic construct
  misc_feature 1..21: note = Targeting Domain
  source 1..21: mol_type = other RNA
gcagggccagggccgtccagg

SEQ ID NO: 412 - RNA, 23 nt, synthetic construct
  misc_feature 1..23: note = Targeting Domain
  source 1..23: mol_type = other RNA
gtgcagggccagggccgtccagg

SEQ ID NO: 413 - RNA, 18 nt, synthetic construct
  misc_feature 1..18: note = Targeting Domain
  source 1..18: mol_type = other RNA
acctcgggggggatagac

SEQ ID NO: 414 - RNA, 20 nt, synthetic construct
  misc_feature 1..20: note = Targeting Domain
  source 1..20: mol_type = other RNA
tgacctcgggggggatagac

SEQ ID NO: 415 - RNA, 21 nt, synthetic construct
  misc_feature 1..21: note = Targeting Domain
  source 1..21: mol_type = other RNA
ttgacctcgggggggatagac

SEQ ID NO: 416 - RNA, 22 nt, synthetic construct
  misc_feature 1..22: note = Targeting Domain
  source 1..22: mol_type = other RNA
cttgacctcgggggggatagac

SEQ ID NO: 417 - RNA, 23 nt, synthetic construct
  misc_feature 1..23: note = Targeting Domain
  source 1..23: mol_type = other RNA
acttgacctcgggggggatagac

SEQ ID NO: 418 - RNA, 24 nt, synthetic construct
  misc_feature 1..24: note = Targeting Domain
  source 1..24: mol_type = other RNA
aacttgacctcgggggggatagac

SEQ ID NO: 419 - RNA, 19 nt, synthetic construct
  misc_feature 1..19: note = Targeting Domain
  source 1..19: mol_type = other RNA
tgttgaacttgacctcggg

SEQ ID NO: 420 - RNA, 21 nt, synthetic construct
  misc_feature 1..21: note = Targeting Domain
  source 1..21: mol_type = other RNA
tttgttgaacttgacctcggg

SEQ ID NO: 421 - RNA, 21 nt, synthetic construct
  misc_feature 1..21: note = Targeting Domain
  source 1..21: mol_type = other RNA
cgagaggcagttatttttggg

SEQ ID NO: 422 - RNA, 23 nt, synthetic construct
  misc_feature 1..23: note = Targeting Domain
  source 1..23: mol_type = other RNA
agcgagaggcagttatttttggg

SEQ ID NO: 423 - RNA, 21 nt, synthetic construct
  misc_feature 1..21: note = Targeting Domain
  source 1..21: mol_type = other RNA
aggagcgagaggcagttattt

SEQ ID NO: 424 - RNA, 23 nt, synthetic construct
  misc_feature 1..23: note = Targeting Domain
  source 1..23: mol_type = other RNA
tgaggagcgagaggcagttattt

SEQ ID NO: 425 - RNA, 24 nt, synthetic construct
  misc_feature 1..24: note = Targeting Domain
  source 1..24: mol_type = other RNA
ttgaggagcgagaggcagttattt

SEQ ID NO: 426 - RNA, 22 nt, synthetic construct
  misc_feature 1..22: note = Targeting Domain
  source 1..22: mol_type = other RNA
aggcctatgtgacagggaggga

SEQ ID NO: 427 - RNA, 23 nt, synthetic construct
  misc_feature 1..23: note = Targeting Domain
  source 1..23: mol_type = other RNA
aaggcctatgtgacagggaggga

SEQ ID NO: 428 - RNA, 24 nt, synthetic construct
  misc_feature 1..24: note = Targeting Domain
  source 1..24: mol_type = other RNA
caaggcctatgtgacagggaggga

SEQ ID NO: 429 - RNA, 21 nt, synthetic construct
  misc_feature 1..21: note = Targeting Domain
  source 1..21: mol_type = other RNA
acgtgagccttgctcgaggcc

SEQ ID NO: 430 - RNA, 22 nt, synthetic construct
  misc_feature 1..22: note = Targeting Domain
  source 1..22: mol_type = other RNA
cacgtgagccttgctcgaggcc

SEQ ID NO: 431 - RNA, 23 nt, synthetic construct
  misc_feature 1..23: note = Targeting Domain
  source 1..23: mol_type = other RNA
ccacgtgagccttgctcgaggcc

SEQ ID NO: 432 - RNA, 24 nt, synthetic construct
  misc_feature 1..24: note = Targeting Domain
  source 1..24: mol_type = other RNA
tccacgtgagccttgctcgaggcc

SEQ ID NO: 433 - RNA, 22 nt, synthetic construct
  misc_feature 1..22: note = Targeting Domain
  source 1..22: mol_type = other RNA
tgcagggccagggccgtccagg

SEQ ID NO: 434 - RNA, 24 nt, synthetic construct
  misc_feature 1..24: note = Targeting Domain
  source 1..24: mol_type = other RNA
tgtgcagggccagggccgtccagg

SEQ ID NO: 435 - RNA, 21 nt, synthetic construct
  misc_feature 1..21: note = Targeting Domain
  source 1..21: mol_type = other RNA
cccctcttcatgggaaaagtg

SEQ ID NO: 436 - RNA, 22 nt, synthetic construct
  misc_feature 1..22: note = Targeting Domain
  source 1..22: mol_type = other RNA
tcccctcttcatgggaaaagtg

SEQ ID NO: 437 - RNA, 23 nt, synthetic construct
  misc_feature 1..23: note = Targeting Domain
  source 1..23: mol_type = other RNA
ctcccctcttcatgggaaaagtg

SEQ ID NO: 438 - RNA, 24 nt, synthetic construct
  misc_feature 1..24: note = Targeting Domain
  source 1..24: mol_type = other RNA
tctcccctcttcatgggaaaagtg

SEQ ID NO: 439 - RNA, 20 nt, synthetic construct
  misc_feature 1..20: note = Targeting Domain
  source 1..20: mol_type = other RNA
gttcaatcattaagaagaca

SEQ ID NO: 440 - RNA, 18 nt, synthetic construct
  misc_feature 1..18: note = Targeting Domain
  source 1..18: mol_type = other RNA
gaggcagttatttttggg

SEQ ID NO: 441 - RNA, 19 nt, synthetic construct
  misc_feature 1..19: note = Targeting Domain
  source 1..19: mol_type = other RNA
gagcgagaggcagttattt

SEQ ID NO: 442 - RNA, 20 nt, synthetic construct
  misc_feature 1..20: note = Targeting Domain
  source 1..20: mol_type = other RNA
ggagcgagaggcagttattt

SEQ ID NO: 443 - RNA, 20 nt, synthetic construct
  misc_feature 1..20: note = Targeting Domain
  source 1..20: mol_type = other RNA
gcctatgtgacagggaggga

SEQ ID NO: 444 - RNA, 19 nt, synthetic construct
  misc_feature 1..19: note = Targeting Domain
  source 1..19: mol_type = other RNA
gtgagccttgctcgaggcc

SEQ ID NO: 445 - RNA, 18 nt, synthetic construct
  misc_feature 1..18: note = Targeting Domain
  source 1..18: mol_type = other RNA
gggccagggccgtccagg

SEQ ID NO: 446 - RNA, 18 nt, synthetic construct
  misc_feature 1..18: note = Targeting Domain
  source 1..18: mol_type = other RNA
tcaatcattaagaagaca

SEQ ID NO: 447 - RNA, 19 nt, synthetic construct
  misc_feature 1..19: note = Targeting Domain
  source 1..19: mol_type = other RNA
ttcaatcattaagaagaca

SEQ ID NO: 448 - RNA, 21 nt, synthetic construct
  misc_feature 1..21: note = Targeting Domain
  source 1..21: mol_type = other RNA
tgttcaatcattaagaagaca

SEQ ID NO: 449 - RNA, 22 nt, synthetic construct
  misc_feature 1..22: note = Targeting Domain
  source 1..22: mol_type = other RNA
ttgttcaatcattaagaagaca

SEQ ID NO: 450 - RNA, 23 nt, synthetic construct
  misc_feature 1..23: note = Targeting Domain
  source 1..23: mol_type = other RNA
tttgttcaatcattaagaagaca

SEQ ID NO: 451 - RNA, 24 nt, synthetic construct
  misc_feature 1..24: note = Targeting Domain
  source 1..24: mol_type = other RNA
ttttgttcaatcattaagaagaca

SEQ ID NO: 452 - RNA, 19 nt, synthetic construct
  misc_feature 1..19: note = Targeting Domain
  source 1..19: mol_type = other RNA
agaggcagttatttttggg

SEQ ID NO: 453 - RNA, 18 nt, synthetic construct
  misc_feature 1..18: note = Targeting Domain
  source 1..18: mol_type = other RNA
agcgagaggcagttattt

SEQ ID NO: 454 - RNA, 18 nt, synthetic construct
  misc_feature 1..18: note = Targeting Domain
  source 1..18: mol_type = other RNA
ctatgtgacagggaggga

SEQ ID NO: 455 - RNA, 19 nt, synthetic construct
  misc_feature 1..19: note = Targeting Domain
  source 1..19: mol_type = other RNA
cctatgtgacagggaggga

SEQ ID NO: 456 - RNA, 18 nt, synthetic construct
  misc_feature 1..18: note = Targeting Domain
  source 1..18: mol_type = other RNA
tgagccttgctcgaggcc

SEQ ID NO: 457 - RNA, 19 nt, synthetic construct
  misc_feature 1..19: note = Targeting Domain
  source 1..19: mol_type = other RNA
agggccagggccgtccagg

SEQ ID NO: 458 - RNA, 18 nt, synthetic construct
  misc_feature 1..18: note = Targeting Domain
  source 1..18: mol_type = other RNA
ctcttcatgggaaaagtg

SEQ ID NO: 459 - RNA, 19 nt, synthetic construct
  misc_feature 1..19: note = Targeting Domain
  source 1..19: mol_type = other RNA
cctcttcatgggaaaagtg

SEQ ID NO: 460 - RNA, 20 nt, synthetic construct
  misc_feature 1..20: note = Targeting Domain
  source 1..20: mol_type = other RNA
ccctcttcatgggaaaagtg

SEQ ID NO: 461 - RNA, 18 nt, synthetic construct
  misc_feature 1..18: note = Targeting Domain
  source 1..18: mol_type = other RNA
caccacttttcccatgaa

SEQ ID NO: 462 - RNA, 19 nt, synthetic construct
  misc_feature 1..19: note = Targeting Domain
  source 1..19: mol_type = other RNA
tcaccacttttcccatgaa

SEQ ID NO: 463 - RNA, 20 nt, synthetic construct
  misc_feature 1..20: note = Targeting Domain
  source 1..20: mol_type = other RNA
ttcaccacttttcccatgaa

SEQ ID NO: 464 - RNA, 21 nt, synthetic construct
  misc_feature 1..21: note = Targeting Domain
  source 1..21: mol_type = other RNA
attcaccacttttcccatgaa

SEQ ID NO: 465 - RNA, 22 nt, synthetic construct
  misc_feature 1..22: note = Targeting Domain
  source 1..22: mol_type = other RNA
gattcaccacttttcccatgaa

SEQ ID NO: 466 - RNA, 23 nt, synthetic construct
  misc_feature 1..23: note = Targeting Domain
  source 1..23: mol_type = other RNA
ggattcaccacttttcccatgaa

SEQ ID NO: 467 - RNA, 24 nt, synthetic construct
  misc_feature 1..24: note = Targeting Domain
  source 1..24: mol_type = other RNA
gggattcaccacttttcccatgaa

SEQ ID NO: 468 - RNA, 18 nt, synthetic construct
  misc_feature 1..18: note = Targeting Domain
  source 1..18: mol_type = other RNA
ccacttttcccatgaaga

SEQ ID NO: 469 - RNA, 19 nt, synthetic construct
  misc_feature 1..19: note = Targeting Domain
  source 1..19: mol_type = other RNA
accacttttcccatgaaga

SEQ ID NO: 470 - RNA, 21 nt, synthetic construct
  misc_feature 1..21: note = Targeting Domain
  source 1..21: mol_type = other RNA
tcaccacttttcccatgaaga

SEQ ID NO: 471 - RNA, 22 nt, synthetic construct
  misc_feature 1..22: note = Targeting Domain
  source 1..22: mol_type = other RNA
ttcaccacttttcccatgaaga

SEQ ID NO: 472 - RNA, 23 nt, synthetic construct
  misc_feature 1..23: note = Targeting Domain
  source 1..23: mol_type = other RNA
attcaccacttttcccatgaaga

SEQ ID NO: 473 - RNA, 24 nt, synthetic construct
  misc_feature 1..24: note = Targeting Domain
  source 1..24: mol_type = other RNA
gattcaccacttttcccatgaaga

SEQ ID NO: 474 - RNA, 18 nt, synthetic construct
  misc_feature 1..18: note = Targeting Domain
  source 1..18: mol_type = other RNA
gaggggaggggttgagga

SEQ ID NO: 475 - RNA, 19 nt, synthetic construct
  misc_feature 1..19: note = Targeting Domain
  source 1..19: mol_type = other RNA
ggaggggaggggttgagga

SEQ ID NO: 476 - RNA, 20 nt, synthetic construct
  misc_feature 1..20: note = Targeting Domain
  source 1..20: mol_type = other RNA
tggaggggaggggttgagga

SEQ ID NO: 477 - RNA, 21 nt, synthetic construct
  misc_feature 1..21: note = Targeting Domain
  source 1..21: mol_type = other RNA
atggaggggaggggttgagga

SEQ ID NO: 478 - RNA, 22 nt, synthetic construct
  misc_feature 1..22: note = Targeting Domain
  source 1..22: mol_type = other RNA
gatggaggggaggggttgagga

SEQ ID NO: 479 - RNA, 23 nt, synthetic construct
  misc_feature 1..23: note = Targeting Domain
  source 1..23: mol_type = other RNA
ggatggaggggaggggttgagga

SEQ ID NO: 480 - RNA, 24 nt, synthetic construct
  misc_feature 1..24: note = Targeting Domain
  source 1..24: mol_type = other RNA
gggatggaggggaggggttgagga

SEQ ID NO: 481 - RNA, 18 nt, synthetic construct
  misc_feature 1..18: note = Targeting Domain
  source 1..18: mol_type = other RNA
tgcacggcctggagggga

SEQ ID NO: 482 - RNA, 19 nt, synthetic construct
  misc_feature 1..19: note = Targeting Domain
  source 1..19: mol_type = other RNA
atgcacggcctggagggga

SEQ ID NO: 483 - RNA, 20 nt, synthetic construct
  misc_feature 1..20: note = Targeting Domain
  source 1..20: mol_type = other RNA
tatgcacggcctggagggga

SEQ ID NO: 484 - RNA, 21 nt, synthetic construct
  misc_feature 1..21: note = Targeting Domain
  source 1..21: mol_type = other RNA
ttatgcacggcctggagggga

SEQ ID NO: 485 - RNA, 22 nt, synthetic construct
  misc_feature 1..22: note = Targeting Domain
  source 1..22: mol_type = other RNA
cttatgcacggcctggagggga

SEQ ID NO: 486 - RNA, 23 nt, synthetic construct
  misc_feature 1..23: note = Targeting Domain
  source 1..23: mol_type = other RNA
ccttatgcacggcctggagggga

SEQ ID NO: 487 - RNA, 24 nt, synthetic construct
  misc_feature 1..24: note = Targeting Domain
  source 1..24: mol_type = other RNA
gccttatgcacggcctggagggga

SEQ ID NO: 488 - RNA, 18 nt, synthetic construct
  misc_feature 1..18: note = Targeting Domain
  source 1..18: mol_type = other RNA
ccttatgcacggcctgga

SEQ ID NO: 489 - RNA, 19 nt, synthetic construct
  misc_feature 1..19: note = Targeting Domain
  source 1..19: mol_type = other RNA
gccttatgcacggcctgga

SEQ ID NO: 490 - RNA, 21 nt, synthetic construct
  misc_feature 1..21: note = Targeting Domain
  source 1..21: mol_type = other RNA
cagccttatgcacggcctgga

SEQ ID NO: 491 - RNA, 22 nt, synthetic construct
  misc_feature 1..22: note = Targeting Domain
  source 1..22: mol_type = other RNA
acagccttatgcacggcctgga

SEQ ID NO: 492 - RNA, 23 nt, synthetic construct
  misc_feature 1..23: note = Targeting Domain
  source 1..23: mol_type = other RNA
cacagccttatgcacggcctgga

SEQ ID NO: 493 - RNA, 24 nt, synthetic construct
  misc_feature 1..24: note = Targeting Domain
  source 1..24: mol_type = other RNA
gcacagccttatgcacggcctgga

SEQ ID NO: 494 - RNA, 18 nt, synthetic construct
  misc_feature 1..18: note = Targeting Domain
  source 1..18: mol_type = other RNA
gcctcgagcaaggctcac

SEQ ID NO: 495 - RNA, 19 nt, synthetic construct
  misc_feature 1..19: note = Targeting Domain
  source 1..19: mol_type = other RNA
ggcctcgagcaaggctcac

SEQ ID NO: 496 - RNA, 20 nt, synthetic construct
  misc_feature 1..20: note = Targeting Domain
  source 1..20: mol_type = other RNA
aggcctcgagcaaggctcac

SEQ ID NO: 497 - RNA, 21 nt, synthetic construct
  misc_feature 1..21: note = Targeting Domain
  source 1..21: mol_type = other RNA
caggcctcgagcaaggctcac

SEQ ID NO: 498 - RNA, 22 nt, synthetic construct
  misc_feature 1..22: note = Targeting Domain
  source 1..22: mol_type = other RNA
ccaggcctcgagcaaggctcac

SEQ ID NO: 499 - RNA, 23 nt, synthetic construct
  misc_feature 1..23: note = Targeting Domain
  source 1..23: mol_type = other RNA
cccaggcctcgagcaaggctcac

SEQ ID NO: 500 - RNA, 24 nt, synthetic construct
  misc_feature 1..24: note = Targeting Domain
  source 1..24: mol_type = other RNA
tcccaggcctcgagcaaggctcac

SEQ ID NO: 501 - RNA, 18 nt, synthetic construct
  misc_feature 1..18: note = Targeting Domain
  source 1..18: mol_type = other RNA
ggtttgttgaacttgacc

SEQ ID NO: 502 - RNA, 19 nt, synthetic construct
  misc_feature 1..19: note = Targeting Domain
  source 1..19: mol_type = other RNA
gggtttgttgaacttgacc

SEQ ID NO: 503 - RNA, 20 nt, synthetic construct
  misc_feature 1..20: note = Targeting Domain
  source 1..20: mol_type = other RNA
agggtttgttgaacttgacc

SEQ ID NO: 504 - RNA, 21 nt, synthetic construct
  misc_feature 1..21: note = Targeting Domain
  source 1..21: mol_type = other RNA
aagggtttgttgaacttgacc

SEQ ID NO: 505 - RNA, 22 nt, synthetic construct
  misc_feature 1..22: note = Targeting Domain
  source 1..22: mol_type = other RNA
aaagggtttgttgaacttgacc

SEQ ID NO: 506 - RNA, 23 nt, synthetic construct
  misc_feature 1..23: note = Targeting Domain
  source 1..23: mol_type = other RNA
caaagggtttgttgaacttgacc

SEQ ID NO: 507 - RNA, 24 nt, synthetic construct
  misc_feature 1..24: note = Targeting Domain
  source 1..24: mol_type = other RNA
acaaagggtttgttgaacttgacc

SEQ ID NO: 508 - RNA, 18 nt, synthetic construct
  misc_feature 1..18: note = Targeting Domain
  source 1..18: mol_type = other RNA
aggaagcgctcactcccc

SEQ ID NO: 509 - RNA, 19 nt, synthetic construct
  misc_feature 1..19: note = Targeting Domain
  source 1..19: mol_type = other RNA
caggaagcgctcactcccc

SEQ ID NO: 510 - RNA, 20 nt, synthetic construct
  misc_feature 1..20: note = Targeting Domain
  source 1..20: mol_type = other RNA
ccaggaagcgctcactcccc

SEQ ID NO: 511 - RNA, 21 nt, synthetic construct
  misc_feature 1..21: note = Targeting Domain
  source 1..21: mol_type = other RNA
cccaggaagcgctcactcccc

SEQ ID NO: 512 - RNA, 22 nt, synthetic construct
  misc_feature 1..22: note = Targeting Domain
  source 1..22: mol_type = other RNA
tcccaggaagcgctcactcccc

SEQ ID NO: 513 - RNA, 23 nt, synthetic construct
  misc_feature 1..23: note = Targeting Domain
  source 1..23: mol_type = other RNA
ctcccaggaagcgctcactcccc

SEQ ID NO: 514 - RNA, 24 nt, synthetic construct
  misc_feature 1..24: note = Targeting Domain
  source 1..24: mol_type = other RNA
cctcccaggaagcgctcactcccc

SEQ ID NO: 515 - RNA, 18 nt, synthetic construct
  misc_feature 1..18: note = Targeting Domain
  source 1..18: mol_type = other RNA
ctcacgtggacacctccc

SEQ ID NO: 516 - RNA, 19 nt, synthetic construct
  misc_feature 1..19: note = Targeting Domain
  source 1..19: mol_type = other RNA
gctcacgtggacacctccc

SEQ ID NO: 517 - RNA, 21 nt, synthetic construct
  misc_feature 1..21: note = Targeting Domain
  source 1..21: mol_type = other RNA
aggctcacgtggacacctccc

SEQ ID NO: 518 - RNA, 22 nt, synthetic construct
  misc_feature 1..22: note = Targeting Domain
  source 1..22: mol_type = other RNA
aaggctcacgtggacacctccc

SEQ ID NO: 519 - RNA, 23 nt, synthetic construct
  misc_feature 1..23: note = Targeting Domain
  source 1..23: mol_type = other RNA
caaggctcacgtggacacctccc

SEQ ID NO: 520 - RNA, 24 nt, synthetic construct
  misc_feature 1..24: note = Targeting Domain
  source 1..24: mol_type = other RNA
gcaaggctcacgtggacacctccc

SEQ ID NO: 521 - RNA, 18 nt, synthetic construct
  misc_feature 1..18: note = Targeting Domain
  source 1..18: mol_type = other RNA
ggattcaccacttttccc

SEQ ID NO: 522 - RNA, 19 nt, synthetic construct
  misc_feature 1..19: note = Targeting Domain
  source 1..19: mol_type = other RNA
gggattcaccacttttccc

SEQ ID NO: 523 - RNA, 20 nt, synthetic construct
  misc_feature 1..20: note = Targeting Domain
  source 1..20: mol_type = other RNA
tgggattcaccacttttccc

SEQ ID NO: 524 - RNA, 21 nt, synthetic construct
  misc_feature 1..21: note = Targeting Domain
  source 1..21: mol_type = other RNA
gtgggattcaccacttttccc

SEQ ID NO: 525 - RNA, 22 nt, synthetic construct
  misc_feature 1..22: note = Targeting Domain
  source 1..22: mol_type = other RNA
ggtgggattcaccacttttccc

SEQ ID NO: 526 - RNA, 23 nt, synthetic construct
  misc_feature 1..23: note = Targeting Domain
  source 1..23: mol_type = other RNA
gggtgggattcaccacttttccc

SEQ ID NO: 527 - RNA, 24 nt, synthetic construct
  misc_feature 1..24: note = Targeting Domain
  source 1..24: mol_type = other RNA
tgggtgggattcaccacttttccc

SEQ ID NO: 528 - RNA, 18 nt, synthetic construct
  misc_feature 1..18: note = Targeting Domain
  source 1..18: mol_type = other RNA
taaggctgatcccaggcc

SEQ ID NO: 529 - RNA, 19 nt, synthetic construct
  misc_feature 1..19: note = Targeting Domain
  source 1..19: mol_type = other RNA
gtaaggctgatcccaggcc

SEQ ID NO: 530 - RNA, 20 nt, synthetic construct
  misc_feature 1..20: note = Targeting Domain
  source 1..20: mol_type = other RNA
tgtaaggctgatcccaggcc

SEQ ID NO: 531 - RNA, 21 nt, synthetic construct
  misc_feature 1..21: note = Targeting Domain
  source 1..21: mol_type = other RNA
ttgtaaggctgatcccaggcc

SEQ ID NO: 532 - RNA, 22 nt, synthetic construct
  misc_feature 1..22: note = Targeting Domain
  source 1..22: mol_type = other RNA
gttgtaaggctgatcccaggcc

SEQ ID NO: 533 - RNA, 23 nt, synthetic construct
  misc_feature 1..23: note = Targeting Domain
  source 1..23: mol_type = other RNA
cgttgtaaggctgatcccaggcc

SEQ ID NO: 534 - RNA, 24 nt, synthetic construct
  misc_feature 1..24: note = Targeting Domain
  source 1..24: mol_type = other RNA
acgttgtaaggctgatcccaggcc

SEQ ID NO: 535 - RNA, 18 nt, synthetic construct
  misc_feature 1..18: note = Targeting Domain
  source 1..18: mol_type = other RNA
acagccttatgcacggcc

SEQ ID NO: 536 - RNA, 19 nt, synthetic construct
  misc_feature 1..19: note = Targeting Domain
  source 1..19: mol_type = other RNA
cacagccttatgcacggcc

SEQ ID NO: 537 - RNA, 21 nt, synthetic construct
  misc_feature 1..21: note = Targeting Domain
  source 1..21: mol_type = other RNA
agcacagccttatgcacggcc

SEQ ID NO: 538 - RNA, 22 nt, synthetic construct
  misc_feature 1..22: note = Targeting Domain
  source 1..22: mol_type = other RNA
cagcacagccttatgcacggcc

SEQ ID NO: 539 - RNA, 23 nt, synthetic construct
  misc_feature 1..23: note = Targeting Domain
  source 1..23: mol_type = other RNA
tcagcacagccttatgcacggcc

SEQ ID NO: 540 - RNA, 24 nt, synthetic construct
  misc_feature 1..24: note = Targeting Domain
  source 1..24: mol_type = other RNA
gtcagcacagccttatgcacggcc

SEQ ID NO: 541 - RNA, 18 nt, synthetic construct
  misc_feature 1..18: note = Targeting Domain
  source 1..18: mol_type = other RNA
gctcacgtggacacctcc

SEQ ID NO: 542 - RNA, 19 nt, synthetic construct
  misc_feature 1..19: note = Targeting Domain
  source 1..19: mol_type = other RNA
ggctcacgtggacacctcc

SEQ ID NO: 543 - RNA, 20 nt, synthetic construct
  misc_feature 1..20: note = Targeting Domain
  source 1..20: mol_type = other RNA
aggctcacgtggacacctcc

SEQ ID NO: 544 - RNA, 21 nt, synthetic construct
  misc_feature 1..21: note = Targeting Domain
  source 1..21: mol_type = other RNA
aaggctcacgtggacacctcc

SEQ ID NO: 545 - RNA, 22 nt, synthetic construct
  misc_feature 1..22: note = Targeting Domain
  source 1..22: mol_type = other RNA
caaggctcacgtggacacctcc

SEQ ID NO: 546 - RNA, 23 nt, synthetic construct
  misc_feature 1..23: note = Targeting Domain
  source 1..23: mol_type = other RNA
gcaaggctcacgtggacacctcc

SEQ ID NO: 547 - RNA, 24 nt, synthetic construct
  misc_feature 1..24: note = Targeting Domain
  source 1..24: mol_type = other RNA
agcaaggctcacgtggacacctcc

SEQ ID NO: 548 - RNA, 18 nt, synthetic construct
  misc_feature 1..18: note = Targeting Domain
  source 1..18: mol_type = other RNA
ggggaggggttgaggagc

SEQ ID NO: 549 - RNA, 19 nt, synthetic construct
  misc_feature 1..19: note = Targeting Domain
  source 1..19: mol_type = other RNA
aggggaggggttgaggagc

SEQ ID NO: 550 - RNA, 20 nt, synthetic construct
  misc_feature 1..20: note = Targeting Domain
  source 1..20: mol_type = other RNA
gaggggaggggttgaggagc

SEQ ID NO: 551 - RNA, 21 nt, synthetic construct
  misc_feature 1..21: note = Targeting Domain
  source 1..21: mol_type = other RNA
ggaggggaggggttgaggagc

SEQ ID NO: 552 - RNA, 22 nt, synthetic construct
  misc_feature 1..22: note = Targeting Domain
  source 1..22: mol_type = other RNA
tggaggggaggggttgaggagc

SEQ ID NO: 553 - RNA, 23 nt, synthetic construct
  misc_feature 1..23: note = Targeting Domain
  source 1..23: mol_type = other RNA
atggaggggaggggttgaggagc

SEQ ID NO: 554 - RNA, 24 nt, synthetic construct
  misc_feature 1..24: note = Targeting Domain
  source 1..24: mol_type = other RNA
gatggaggggaggggttgaggagc

SEQ ID NO: 555 - RNA, 18 nt, synthetic construct
  misc_feature 1..18: note = Targeting Domain
  source 1..18: mol_type = other RNA
cacagccttatgcacggc

SEQ ID NO: 556 - RNA, 19 nt, synthetic construct
  misc_feature 1..19: note = Targeting Domain
  source 1..19: mol_type = other RNA
gcacagccttatgcacggc

SEQ ID NO: 557 - RNA, 20 nt, synthetic construct
  misc_feature 1..20: note = Targeting Domain
  source 1..20: mol_type = other RNA
agcacagccttatgcacggc

SEQ ID NO: 558 - RNA, 21 nt, synthetic construct
  misc_feature 1..21: note = Targeting Domain
  source 1..21: mol_type = other RNA
cagcacagccttatgcacggc

SEQ ID NO: 559 - RNA, 22 nt, synthetic construct
  misc_feature 1..22: note = Targeting Domain
  source 1..22: mol_type = other RNA
tcagcacagccttatgcacggc

SEQ ID NO: 560 - RNA, 23 nt, synthetic construct
  misc_feature 1..23: note = Targeting Domain
  source 1..23: mol_type = other RNA
gtcagcacagccttatgcacggc

SEQ ID NO: 561 - RNA, 24 nt, synthetic construct
  misc_feature 1..24: note = Targeting Domain
  source 1..24: mol_type = other RNA
ggtcagcacagccttatgcacggc

SEQ ID NO: 562 - RNA, 18 nt, synthetic construct
  misc_feature 1..18: note = Targeting Domain
  source 1..18: mol_type = other RNA
tttgttgaacttgacctc

SEQ ID NO: 563 - RNA, 19 nt, synthetic construct
  misc_feature 1..19: note = Targeting Domain
  source 1..19: mol_type = other RNA
gtttgttgaacttgacctc

SEQ ID NO: 564 - RNA, 21 nt, synthetic construct
  misc_feature 1..21: note = Targeting Domain
  source 1..21: mol_type = other RNA
gggtttgttgaacttgacctc

SEQ ID NO: 565 - RNA, 22 nt, synthetic construct
  misc_feature 1..22: note = Targeting Domain
  source 1..22: mol_type = other RNA
agggtttgttgaacttgacctc

SEQ ID NO: 566 - RNA, 23 nt, synthetic construct
  misc_feature 1..23: note = Targeting Domain
  source 1..23: mol_type = other RNA
aagggtttgttgaacttgacctc

SEQ ID NO: 567 - RNA, 24 nt, synthetic construct
  misc_feature 1..24: note = Targeting Domain
  source 1..24: mol_type = other RNA
aaagggtttgttgaacttgacctc

SEQ ID NO: 568 - RNA, 18 nt, synthetic construct
  misc_feature 1..18: note = Targeting Domain
  source 1..18: mol_type = other RNA
gcctggaggggagagaag

SEQ ID NO: 569 - RNA, 19 nt, synthetic construct
  misc_feature 1..19: note = Targeting Domain
  source 1..19: mol_type = other RNA
ggcctggaggggagagaag

SEQ ID NO: 570 - RNA, 20 nt, synthetic construct
  misc_feature 1..20: note = Targeting Domain
  source 1..20: mol_type = other RNA
cggcctggaggggagagaag

SEQ ID NO: 571 - RNA, 21 nt, synthetic construct
  misc_feature 1..21: note = Targeting Domain
  source 1..21: mol_type = other RNA
acggcctggaggggagagaag

SEQ ID NO: 572 - RNA, 22 nt, synthetic construct
  misc_feature 1..22: note = Targeting Domain
  source 1..22: mol_type = other RNA
cacggcctggaggggagagaag

SEQ ID NO: 573 - RNA, 23 nt, synthetic construct
  misc_feature 1..23: note = Targeting Domain
  source 1..23: mol_type = other RNA
gcacggcctggaggggagagaag

SEQ ID NO: 574 - RNA, 24 nt, synthetic construct
  misc_feature 1..24: note = Targeting Domain
  source 1..24: mol_type = other RNA
tgcacggcctggaggggagagaag

SEQ ID NO: 575 - RNA, 18 nt, synthetic construct
  misc_feature 1..18: note = Targeting Domain
  source 1..18: mol_type = other RNA
accacttttcccatgaag

SEQ ID NO: 576 - RNA, 19 nt, synthetic construct
  misc_feature 1..19: note = Targeting Domain
  source 1..19: mol_type = other RNA
caccacttttcccatgaag

SEQ ID NO: 577 - RNA, 21 nt, synthetic construct
  misc_feature 1..21: note = Targeting Domain
  source 1..21: mol_type = other RNA
ttcaccacttttcccatgaag

SEQ ID NO: 578 - RNA, 22 nt, synthetic construct
  misc_feature 1..22: note = Targeting Domain
  source 1..22: mol_type = other RNA
attcaccacttttcccatgaag

SEQ ID NO: 579 - RNA, 23 nt, synthetic construct
  misc_feature 1..23: note = Targeting Domain
  source 1..23: mol_type = other RNA
gattcaccacttttcccatgaag

SEQ ID NO: 580 - RNA, 24 nt, synthetic construct
  misc_feature 1..24: note = Targeting Domain
  source 1..24: mol_type = other RNA
ggattcaccacttttcccatgaag

SEQ ID NO: 581 - RNA, 18 nt, synthetic construct
  misc_feature 1..18: note = Targeting Domain
  source 1..18: mol_type = other RNA
cacttttcccatgaagag

SEQ ID NO: 582 - RNA, 19 nt, synthetic construct
  misc_feature 1..19: note = Targeting Domain
  source 1..19: mol_type = other RNA
ccacttttcccatgaagag

SEQ ID NO: 583 - RNA, 21 nt, synthetic construct
  misc_feature 1..21: note = Targeting Domain
  source 1..21: mol_type = other RNA
caccacttttcccatgaagag

SEQ ID NO: 584 - RNA, 22 nt, synthetic construct
  misc_feature 1..22: note = Targeting Domain
  source 1..22: mol_type = other RNA
tcaccacttttcccatgaagag

SEQ ID NO: 585 - RNA, 23 nt, synthetic construct
  misc_feature 1..23: note = Targeting Domain
  source 1..23: mol_type = other RNA
ttcaccacttttcccatgaagag

SEQ ID NO: 586 - RNA, 24 nt, synthetic construct
  misc_feature 1..24: note = Targeting Domain
  source 1..24: mol_type = other RNA
attcaccacttttcccatgaagag

SEQ ID NO: 587 - RNA, 18 nt, synthetic construct
  misc_feature 1..18: note = Targeting Domain
  source 1..18: mol_type = other RNA
cttatgcacggcctggag

SEQ ID NO: 588 - RNA, 19 nt, synthetic construct
  misc_feature 1..19: note = Targeting Domain
  source 1..19: mol_type = other RNA
ccttatgcacggcctggag

SEQ ID NO: 589 - RNA, 21 nt, synthetic construct
  misc_feature 1..21: note = Targeting Domain
  source 1..21: mol_type = other RNA
agccttatgcacggcctggag

SEQ ID NO: 590 - RNA, 22 nt, synthetic construct
  misc_feature 1..22: note = Targeting Domain
  source 1..22: mol_type = other RNA
cagccttatgcacggcctggag

SEQ ID NO: 591 - RNA, 23 nt, synthetic construct
  misc_feature 1..23: note = Targeting Domain
  source 1..23: mol_type = other RNA
acagccttatgcacggcctggag

SEQ ID NO: 592 - RNA, 24 nt, synthetic construct
  misc_feature 1..24: note = Targeting Domain
  source 1..24: mol_type = other RNA
cacagccttatgcacggcctggag

SEQ ID NO: 593 - RNA, 18 nt, synthetic construct
  misc_feature 1..18: note = Targeting Domain
  source 1..18: mol_type = other RNA
ttgttgaacttgacctcg

SEQ ID NO: 594 - RNA, 19 nt, synthetic construct
  misc_feature 1..19: note = Targeting Domain
  source 1..19: mol_type = other RNA
tttgttgaacttgacctcg

SEQ ID NO: 595 - RNA, 21 nt, synthetic construct
  misc_feature 1..21: note = Targeting Domain
  source 1..21: mol_type = other RNA
ggtttgttgaacttgacctcg

SEQ ID NO: 596 - RNA, 22 nt, synthetic construct
  misc_feature 1..22: note = Targeting Domain
  source 1..22: mol_type = other RNA
gggtttgttgaacttgacctcg

SEQ ID NO: 597 - RNA, 23 nt, synthetic construct
  misc_feature 1..23: note = Targeting Domain
  source 1..23: mol_type = other RNA
agggtttgttgaacttgacctcg

SEQ ID NO: 598 - RNA, 24 nt, synthetic construct
  misc_feature 1..24: note = Targeting Domain
  source 1..24: mol_type = other RNA
aagggtttgttgaacttgacctcg

SEQ ID NO: 599 - RNA, 18 nt, synthetic construct
  misc_feature 1..18: note = Targeting Domain
  source 1..18: mol_type = other RNA
tgttgaacttgacctcgg

SEQ ID NO: 600 - RNA, 19 nt, synthetic construct
  misc_feature 1..19: note = Targeting Domain
  source 1..19: mol_type = other RNA
ttgttgaacttgacctcgg

SEQ ID NO: 601 - RNA, 21 nt, synthetic construct
  misc_feature 1..21: note = Targeting Domain
  source 1..21: mol_type = other RNA
gtttgttgaacttgacctcgg

SEQ ID NO: 602 - RNA, 22 nt, synthetic construct
  misc_feature 1..22: note = Targeting Domain
  source 1..22: mol_type = other RNA
ggtttgttgaacttgacctcgg

SEQ ID NO: 603 - RNA, 23 nt, synthetic construct
  misc_feature 1..23: note = Targeting Domain
  source 1..23: mol_type = other RNA
gggtttgttgaacttgacctcgg

SEQ ID NO: 604 - RNA, 24 nt, synthetic construct
  misc_feature 1..24: note = Targeting Domain
  source 1..24: mol_type = other RNA
agggtttgttgaacttgacctcgg

SEQ ID NO: 605 - RNA, 18 nt, synthetic construct
  misc_feature 1..18: note = Targeting Domain
  source 1..18: mol_type = other RNA
tatgcacggcctggaggg

SEQ ID NO: 606 - RNA, 19 nt, synthetic construct
  misc_feature 1..19: note = Targeting Domain
  source 1..19: mol_type = other RNA
ttatgcacggcctggaggg

SEQ ID NO: 607 - RNA, 20 nt, synthetic construct
  misc_feature 1..20: note = Targeting Domain
  source 1..20: mol_type = other RNA
cttatgcacggcctggaggg

SEQ ID NO: 608 - RNA, 21 nt, synthetic construct
  misc_feature 1..21: note = Targeting Domain
  source 1..21: mol_type = other RNA
ccttatgcacggcctggaggg

SEQ ID NO: 609 - RNA, 22 nt, synthetic construct
  misc_feature 1..22: note = Targeting Domain
  source 1..22: mol_type = other RNA
gccttatgcacggcctggaggg

SEQ ID NO: 610 - RNA, 23 nt, synthetic construct
  misc_feature 1..23: note = Targeting Domain
  source 1..23: mol_type = other RNA
agccttatgcacggcctggaggg

SEQ ID NO: 611 - RNA, 24 nt, synthetic construct
  misc_feature 1..24: note = Targeting Domain
  source 1..24: mol_type = other RNA
cagccttatgcacggcctggaggg

SEQ ID NO: 612 - RNA, 18 nt, synthetic construct
  misc_feature 1..18: note = Targeting Domain
  source 1..18: mol_type = other RNA
agggatggaggggagggg

SEQ ID NO: 613 - RNA, 19 nt, synthetic construct
  misc_feature 1..19: note = Targeting Domain
  source 1..19: mol_type = other RNA
cagggatggaggggagggg

SEQ ID NO: 614 - RNA, 20 nt, synthetic construct
  misc_feature 1..20: note = Targeting Domain
  source 1..20: mol_type = other RNA
ccagggatggaggggagggg

SEQ ID NO: 615 - RNA, 18 nt, synthetic construct
  misc_feature 1..18: note = Targeting Domain
  source 1..18: mol_type = other RNA
gccttatgcacggcctgg

SEQ ID NO: 616 - RNA, 19 nt, synthetic construct
  misc_feature 1..19: note = Targeting Domain
  source 1..19: mol_type = other RNA
agccttatgcacggcctgg

SEQ ID NO: 617 - RNA, 21 nt, synthetic construct
  misc_feature 1..21: note = Targeting Domain
  source 1..21: mol_type = other RNA
acagccttatgcacggcctgg

SEQ ID NO: 618 - RNA, 22 nt, synthetic construct
  misc_feature 1..22: note = Targeting Domain
  source 1..22: mol_type = other RNA
cacagccttatgcacggcctgg

SEQ ID NO: 619 - RNA, 23 nt, synthetic construct
  misc_feature 1..23: note = Targeting Domain
  source 1..23: mol_type = other RNA
gcacagccttatgcacggcctgg

SEQ ID NO: 620 - RNA, 24 nt, synthetic construct
  misc_feature 1..24: note = Targeting Domain
  source 1..24: mol_type = other RNA
agcacagccttatgcacggcctgg

SEQ ID NO: 621 - RNA, 18 nt, synthetic construct
  misc_feature 1..18: note = Targeting Domain
  source 1..18: mol_type = other RNA
agaggcagttatttttgg

SEQ ID NO: 622 - RNA, 19 nt, synthetic construct
  misc_feature 1..19: note = Targeting Domain
  source 1..19: mol_type = other RNA
gagaggcagttatttttgg

SEQ ID NO: 623 - RNA, 20 nt, synthetic construct
  misc_feature 1..20: note = Targeting Domain
  source 1..20: mol_type = other RNA
cgagaggcagttatttttgg

SEQ ID NO: 624 - RNA, 21 nt, synthetic construct
  misc_feature 1..21: note = Targeting Domain
  source 1..21: mol_type = other RNA
gcgagaggcagttatttttgg

SEQ ID NO: 625 - RNA, 22 nt, synthetic construct
  misc_feature 1..22: note = Targeting Domain
  source 1..22: mol_type = other RNA
agcgagaggcagttatttttgg

SEQ ID NO: 626 - RNA, 23 nt, synthetic construct
  misc_feature 1..23: note = Targeting Domain
  source 1..23: mol_type = other RNA
gagcgagaggcagttatttttgg

SEQ ID NO: 627 - RNA, 24 nt, synthetic construct
  misc_feature 1..24: note = Targeting Domain
  source 1..24: mol_type = other RNA
ggagcgagaggcagttatttttgg

SEQ ID NO: 628 - RNA, 18 nt, synthetic construct
  misc_feature 1..18: note = Targeting Domain
  source 1..18: mol_type = other RNA
ttcaccacttttcccatg

SEQ ID NO: 629 - RNA, 19 nt, synthetic construct
  misc_feature 1..19: note = Targeting Domain
  source 1..19: mol_type = other RNA
attcaccacttttcccatg

SEQ ID NO: 630 - RNA, 20 nt, synthetic construct
  misc_feature 1..20: note = Targeting Domain
  source 1..20: mol_type = other RNA
gattcaccacttttcccatg

SEQ ID NO: 631 - RNA, 21 nt, synthetic construct
  misc_feature 1..21: note = Targeting Domain
  source 1..21: mol_type = other RNA
ggattcaccacttttcccatg

SEQ ID NO: 632 - RNA, 22 nt, synthetic construct
  misc_feature 1..22: note = Targeting Domain
  source 1..22: mol_type = other RNA
gggattcaccacttttcccatg

SEQ ID NO: 633 - RNA, 23 nt, synthetic construct
  misc_feature 1..23: note = Targeting Domain
  source 1..23: mol_type = other RNA
tgggattcaccacttttcccatg

SEQ ID NO: 634 - RNA, 24 nt, synthetic construct
  misc_feature 1..24: note = Targeting Domain
  source 1..24: mol_type = other RNA
gtgggattcaccacttttcccatg

SEQ ID NO: 635 - RNA, 18 nt, synthetic construct
  misc_feature 1..18: note = Targeting Domain
  source 1..18: mol_type = other RNA
agccttatgcacggcctg

SEQ ID NO: 636 - RNA, 19 nt, synthetic construct
  misc_feature 1..19: note = Targeting Domain
  source 1..19: mol_type = other RNA
cagccttatgcacggcctg

SEQ ID NO: 637 - RNA, 20 nt, synthetic construct
  misc_feature 1..20: note = Targeting Domain
  source 1..20: mol_type = other RNA
acagccttatgcacggcctg

SEQ ID NO: 638 - RNA, 21 nt, synthetic construct
  misc_feature 1..21: note = Targeting Domain
  source 1..21: mol_type = other RNA
cacagccttatgcacggcctg

SEQ ID NO: 639 - RNA, 22 nt, synthetic construct
  misc_feature 1..22: note = Targeting Domain
  source 1..22: mol_type = other RNA
gcacagccttatgcacggcctg

SEQ ID NO: 640 - RNA, 23 nt, synthetic construct
  misc_feature 1..23: note = Targeting Domain
  source 1..23: mol_type = other RNA
agcacagccttatgcacggcctg

SEQ ID NO: 641 - RNA, 24 nt, synthetic construct
  misc_feature 1..24: note = Targeting Domain
  source 1..24: mol_type = other RNA
cagcacagccttatgcacggcctg

SEQ ID NO: 642 - RNA, 18 nt, synthetic construct
  misc_feature 1..18: note = Targeting Domain
  source 1..18: mol_type = other RNA
gatggaggggaggggttg

SEQ ID NO: 643 - RNA, 19 nt, synthetic construct
  misc_feature 1..19: note = Targeting Domain
  source 1..19: mol_type = other RNA
ggatggaggggaggggttg

SEQ ID NO: 644 - RNA, 21 nt, synthetic construct
  misc_feature 1..21: note = Targeting Domain
  source 1..21: mol_type = other RNA
agggatggaggggaggggttg

SEQ ID NO: 645 - RNA, 22 nt, synthetic construct
  misc_feature 1..22: note = Targeting Domain
  source 1..22: mol_type = other RNA
cagggatggaggggaggggttg

SEQ ID NO: 646 - RNA, 23 nt, synthetic construct
  misc_feature 1..23: note = Targeting Domain
  source 1..23: mol_type = other RNA
ccagggatggaggggaggggttg

SEQ ID NO: 647 - RNA, 24 nt, synthetic construct
  misc_feature 1..24: note = Targeting Domain
  source 1..24: mol_type = other RNA
gccagggatggaggggaggggttg

SEQ ID NO: 648 - RNA, 18 nt, synthetic construct
  misc_feature 1..18: note = Targeting Domain
  source 1..18: mol_type = other RNA
aagaagacaaagggtttg

SEQ ID NO: 649 - RNA, 19 nt, synthetic construct
  misc_feature 1..19: note = Targeting Domain
  source 1..19: mol_type = other RNA
taagaagacaaagggtttg

SEQ ID NO: 650 - RNA, 20 nt, synthetic construct
  misc_feature 1..20: note = Targeting Domain
  source 1..20: mol_type = other RNA
ttaagaagacaaagggtttg

SEQ ID NO: 651 - RNA, 21 nt, synthetic construct
  misc_feature 1..21: note = Targeting Domain
  source 1..21: mol_type = other RNA
attaagaagacaaagggtttg

SEQ ID NO: 652 - RNA, 22 nt, synthetic construct
  misc_feature 1..22: note = Targeting Domain
  source 1..22: mol_type = other RNA
cattaagaagacaaagggtttg

SEQ ID NO: 653 - RNA, 23 nt, synthetic construct
  misc_feature 1..23: note = Targeting Domain
  source 1..23: mol_type = other RNA
tcattaagaagacaaagggtttg

SEQ ID NO: 654 - RNA, 24 nt, synthetic construct
  misc_feature 1..24: note = Targeting Domain
  source 1..24: mol_type = other RNA
atcattaagaagacaaagggtttg

SEQ ID NO: 655 - RNA, 18 nt, synthetic construct
  misc_feature 1..18: note = Targeting Domain
  source 1..18: mol_type = other RNA
gtttgttgaacttgacct

SEQ ID NO: 656 - RNA, 19 nt, synthetic construct
  misc_feature 1..19: note = Targeting Domain
  source 1..19: mol_type = other RNA
ggtttgttgaacttgacct

SEQ ID NO: 657 - RNA, 21 nt, synthetic construct
  misc_feature 1..21: note = Targeting Domain
  source 1..21: mol_type = other RNA
agggtttgttgaacttgacct

SEQ ID NO: 658 - RNA, 22 nt, synthetic construct
  misc_feature 1..22: note = Targeting Domain
  source 1..22: mol_type = other RNA
aagggtttgttgaacttgacct

SEQ ID NO: 659 - RNA, 23 nt, synthetic construct
  misc_feature 1..23: note = Targeting Domain
  source 1..23: mol_type = other RNA
aaagggtttgttgaacttgacct

SEQ ID NO: 660 - RNA, 24 nt, synthetic construct
  misc_feature 1..24: note = Targeting Domain
  source 1..24: mol_type = other RNA
caaagggtttgttgaacttgacct

SEQ ID NO: 661 - RNA, 18 nt, synthetic construct
  misc_feature 1..18: note = Targeting Domain
  source 1..18: mol_type = other RNA
gtattttgttcaatcatt

SEQ ID NO: 662 - RNA, 19 nt, synthetic construct
  misc_feature 1..19: note = Targeting Domain
  source 1..19: mol_type = other RNA
ggtattttgttcaatcatt

SEQ ID NO: 663 - RNA, 20 nt, synthetic construct
  misc_feature 1..20: note = Targeting Domain
  source 1..20: mol_type = other RNA
tggtattttgttcaatcatt

SEQ ID NO: 664 - RNA, 21 nt, synthetic construct
  misc_feature 1..21: note = Targeting Domain
  source 1..21: mol_type = other RNA
ttggtattttgttcaatcatt

SEQ ID NO: 665 - RNA, 22 nt, synthetic construct
  misc_feature 1..22: note = Targeting Domain
  source 1..22: mol_type = other RNA
cttggtattttgttcaatcatt

SEQ ID NO: 666 - RNA, 23 nt, synthetic construct
  misc_feature 1..23: note = Targeting Domain
  source 1..23: mol_type = other RNA
acttggtattttgttcaatcatt

SEQ ID NO: 667 - RNA, 24 nt, synthetic construct
  misc_feature 1..24: note = Targeting Domain
  source 1..24: mol_type = other RNA
gacttggtattttgttcaatcatt

SEQ ID NO: 668 - RNA, 18 nt, synthetic construct
  misc_feature 1..18: note = Targeting Domain
  source 1..18: mol_type = other RNA
ggatggaggggaggggtt

SEQ ID NO: 669 - RNA, 19 nt, synthetic construct
  misc_feature 1..19: note = Targeting Domain
  source 1..19: mol_type = other RNA
gggatggaggggaggggtt

SEQ ID NO: 670 - RNA, 20 nt, synthetic construct
  misc_feature 1..20: note = Targeting Domain
  source 1..20: mol_type = other RNA
agggatggaggggaggggtt

SEQ ID NO: 671 - RNA, 18 nt, synthetic construct
  misc_feature 1..18: note = Targeting Domain
  source 1..18: mol_type = other RNA
gctgaccatcgacaagaa

SEQ ID NO: 672 - RNA, 19 nt, synthetic construct
  misc_feature 1..19: note = Targeting Domain
  source 1..19: mol_type = other RNA
tgctgaccatcgacaagaa

SEQ ID NO: 673 - RNA, 21 nt, synthetic construct
  misc_feature 1..21: note = Targeting Domain
  source 1..21: mol_type = other RNA
tgtgctgaccatcgacaagaa

SEQ ID NO: 674 - RNA, 22 nt, synthetic construct
  misc_feature 1..22: note = Targeting Domain
  source 1..22: mol_type = other RNA
ctgtgctgaccatcgacaagaa

SEQ ID NO: 675 - RNA, 23 nt, synthetic construct
  misc_feature 1..23: note = Targeting Domain
  source 1..23: mol_type = other RNA
gctgtgctgaccatcgacaagaa

SEQ ID NO: 676 - RNA, 24 nt, synthetic construct
  misc_feature 1..24: note = Targeting Domain
  source 1..24: mol_type = other RNA
ggctgtgctgaccatcgacaagaa

SEQ ID NO: 677 - RNA, 18 nt, synthetic construct
  misc_feature 1..18: note = Targeting Domain
  source 1..18: mol_type = other RNA
agcaaggcctatgtgaca

SEQ ID NO: 678 - RNA, 19 nt, synthetic construct
  misc_feature 1..19: note = Targeting Domain
  source 1..19: mol_type = other RNA
gagcaaggcctatgtgaca

SEQ ID NO: 679 - RNA, 21 nt, synthetic construct
  misc_feature 1..21: note = Targeting Domain
  source 1..21: mol_type = other RNA
aggagcaaggcctatgtgaca

SEQ ID NO: 680 - RNA, 22 nt, synthetic construct
  misc_feature 1..22: note = Targeting Domain
  source 1..22: mol_type = other RNA
gaggagcaaggcctatgtgaca

SEQ ID NO: 681 - RNA, 23 nt, synthetic construct
  misc_feature 1..23: note = Targeting Domain
  source 1..23: mol_type = other RNA
ggaggagcaaggcctatgtgaca

SEQ ID NO: 682 - RNA, 24 nt, synthetic construct
  misc_feature 1..24: note = Targeting Domain
  source 1..24: mol_type = other RNA
aggaggagcaaggcctatgtgaca

SEQ ID NO: 683 - RNA, 18 nt, synthetic construct
  misc_feature 1..18: note = Targeting Domain
  source 1..18: mol_type = other RNA
cagggccagggccgtcca

SEQ ID NO: 684 - RNA, 19 nt, synthetic construct
  misc_feature 1..19: note = Targeting Domain
  source 1..19: mol_type = other RNA
gcagggccagggccgtcca

SEQ ID NO: 685 - RNA, 21 nt, synthetic construct
  misc_feature 1..21: note = Targeting Domain
  source 1..21: mol_type = other RNA
gtgcagggccagggccgtcca

SEQ ID NO: 686 - RNA, 22 nt, synthetic construct
  misc_feature 1..22: note = Targeting Domain
  source 1..22: mol_type = other RNA
tgtgcagggccagggccgtcca

SEQ ID NO: 687 - RNA, 23 nt, synthetic construct
  misc_feature 1..23: note = Targeting Domain
  source 1..23: mol_type = other RNA
atgtgcagggccagggccgtcca

SEQ ID NO: 688 - RNA, 24 nt, synthetic construct
  misc_feature 1..24: note = Targeting Domain
  source 1..24: mol_type = other RNA
gatgtgcagggccagggccgtcca

SEQ ID NO: 689 - RNA, 18 nt, synthetic construct
  misc_feature 1..18: note = Targeting Domain
  source 1..18: mol_type = other RNA
ccaagtctcccctcttca

SEQ ID NO: 690 - RNA, 19 nt, synthetic construct
  misc_feature 1..19: note = Targeting Domain
  source 1..19: mol_type = other RNA
accaagtctcccctcttca

SEQ ID NO: 691 - RNA, 21 nt, synthetic construct
  misc_feature 1..21: note = Targeting Domain
  source 1..21: mol_type = other RNA
ataccaagtctcccctcttca

SEQ ID NO: 692 - RNA, 22 nt, synthetic construct
  misc_feature 1..22: note = Targeting Domain
  source 1..22: mol_type = other RNA
aataccaagtctcccctcttca

SEQ ID NO: 693 - RNA, 23 nt, synthetic construct
  misc_feature 1..23: note = Targeting Domain
  source 1..23: mol_type = other RNA
aaataccaagtctcccctcttca

SEQ ID NO: 694 - RNA, 24 nt, synthetic construct
  misc_feature 1..24: note = Targeting Domain
  source 1..24: mol_type = other RNA
aaaataccaagtctcccctcttca

SEQ ID NO: 695 - RNA, 18 nt, synthetic construct
  misc_feature 1..18: note = Targeting Domain
  source 1..18: mol_type = other RNA
tgctgaccatcgacaaga

SEQ ID NO: 696 - RNA, 19 nt, synthetic construct
  misc_feature 1..19: note = Targeting Domain
  source 1..19: mol_type = other RNA
gtgctgaccatcgacaaga

SEQ ID NO: 697 - RNA, 20 nt, synthetic construct
  misc_feature 1..20: note = Targeting Domain
  source 1..20: mol_type = other RNA
tgtgctgaccatcgacaaga

SEQ ID NO: 698 - RNA, 21 nt, synthetic construct
  misc_feature 1..21: note = Targeting Domain
  source 1..21: mol_type = other RNA
ctgtgctgaccatcgacaaga

SEQ ID NO: 699 - RNA, 22 nt, synthetic construct
  misc_feature 1..22: note = Targeting Domain
  source 1..22: mol_type = other RNA
gctgtgctgaccatcgacaaga

SEQ ID NO: 700 - RNA, 23 nt, synthetic construct
  misc_feature 1..23: note = Targeting Domain
  source 1..23: mol_type = other RNA
ggctgtgctgaccatcgacaaga

SEQ ID NO: 701 - RNA, 24 nt, synthetic construct
  misc_feature 1..24: note = Targeting Domain
  source 1..24: mol_type = other RNA
aggctgtgctgaccatcgacaaga

SEQ ID NO: 702 - RNA, 18 nt, synthetic construct
  misc_feature 1..18: note = Targeting Domain
  source 1..18: mol_type = other RNA
ccatcgacaagaaaggga

SEQ ID NO: 703 - RNA, 19 nt, synthetic construct
  misc_feature 1..19: note = Targeting Domain
  source 1..19: mol_type = other RNA
accatcgacaagaaaggga

SEQ ID NO: 704 - RNA, 20 nt, synthetic construct
  misc_feature 1..20: note = Targeting Domain
  source 1..20: mol_type = other RNA
gaccatcgacaagaaaggga

SEQ ID NO: 705 - RNA, 21 nt, synthetic construct
  misc_feature 1..21: note = Targeting Domain
  source 1..21: mol_type = other RNA
tgaccatcgacaagaaaggga

SEQ ID NO: 706 - RNA, 22 nt, synthetic construct
  misc_feature 1..22: note = Targeting Domain
  source 1..22: mol_type = other RNA
ctgaccatcgacaagaaaggga

SEQ ID NO: 707 - RNA, 23 nt, synthetic construct
  misc_feature 1..23: note = Targeting Domain
  source 1..23: mol_type = other RNA
gctgaccatcgacaagaaaggga

SEQ ID NO: 708 - RNA, 24 nt, synthetic construct
  misc_feature 1..24: note = Targeting Domain
  source 1..24: mol_type = other RNA
tgctgaccatcgacaagaaaggga

SEQ ID NO: 709 - RNA, 18 nt, synthetic construct
  misc_feature 1..18: note = Targeting Domain
  source 1..18: mol_type = other RNA
aggcctatgtgacaggga

SEQ ID NO: 710 - RNA, 19 nt, synthetic construct
  misc_feature 1..19: note = Targeting Domain
  source 1..19: mol_type = other RNA
aaggcctatgtgacaggga

SEQ ID NO: 711 - RNA, 21 nt, synthetic construct
  misc_feature 1..21: note = Targeting Domain
  source 1..21: mol_type = other RNA
gcaaggcctatgtgacaggga

SEQ ID NO: 712 - RNA, 22 nt, synthetic construct
  misc_feature 1..22: note = Targeting Domain
  source 1..22: mol_type = other RNA
agcaaggcctatgtgacaggga

SEQ ID NO: 713 - RNA, 23 nt, synthetic construct
  misc_feature 1..23: note = Targeting Domain
  source 1..23: mol_type = other RNA
gagcaaggcctatgtgacaggga

SEQ ID NO: 714 - RNA, 24 nt, synthetic construct
  misc_feature 1..24: note = Targeting Domain
  source 1..24: mol_type = other RNA
ggagcaaggcctatgtgacaggga

SEQ ID NO: 715 - RNA, 18 nt, synthetic construct
  misc_feature 1..18: note = Targeting Domain
  source 1..18: mol_type = other RNA
cagggccgtccaggggga

SEQ ID NO: 716 - RNA, 19 nt, synthetic construct
  misc_feature 1..19: note = Targeting Domain
  source 1..19: mol_type = other RNA
ccagggccgtccaggggga

SEQ ID NO: 717 - RNA, 20 nt, synthetic construct
  misc_feature 1..20: note = Targeting Domain
  source 1..20: mol_type = other RNA
gccagggccgtccaggggga

SEQ ID NO: 718 - RNA, 21 nt, synthetic construct
  misc_feature 1..21: note = Targeting Domain
  source 1..21: mol_type = other RNA
ggccagggccgtccaggggga

SEQ ID NO: 719 - RNA, 22 nt, synthetic construct
  misc_feature 1..22: note = Targeting Domain
  source 1..22: mol_type = other RNA
gggccagggccgtccaggggga

SEQ ID NO: 720 - RNA, 23 nt, synthetic construct
  misc_feature 1..23: note = Targeting Domain
  source 1..23: mol_type = other RNA
agggccagggccgtccaggggga

SEQ ID NO: 721 - RNA, 24 nt, synthetic construct
  misc_feature 1..24: note = Targeting Domain
  source 1..24: mol_type = other RNA
cagggccagggccgtccaggggga

SEQ ID NO: 722 - RNA, 18 nt, synthetic construct
  misc_feature 1..18: note = Targeting Domain
  source 1..18: mol_type = other RNA
cctttgtcttcttaatga

SEQ ID NO: 723 - RNA, 19 nt, synthetic construct
  misc_feature 1..19: note = Targeting Domain
  source 1..19: mol_type = other RNA
ccctttgtcttcttaatga

SEQ ID NO: 724 - RNA, 20 nt, synthetic construct
  misc_feature 1..20: note = Targeting Domain
  source 1..20: mol_type = other RNA
accctttgtcttcttaatga

SEQ ID NO: 725 - RNA, 21 nt, synthetic construct
  misc_feature 1..21: note = Targeting Domain
  source 1..21: mol_type = other RNA
aaccctttgtcttcttaatga

SEQ ID NO: 726 - RNA, 22 nt, synthetic construct
  misc_feature 1..22: note = Targeting Domain
  source 1..22: mol_type = other RNA
aaaccctttgtcttcttaatga

SEQ ID NO: 727 - RNA, 23 nt, synthetic construct
  misc_feature 1..23: note = Targeting Domain
  source 1..23: mol_type = other RNA
caaaccctttgtcttcttaatga

SEQ ID NO: 728 - RNA, 24 nt, synthetic construct
  misc_feature 1..24: note = Targeting Domain
  source 1..24: mol_type = other RNA
acaaaccctttgtcttcttaatga

SEQ ID NO: 729 - RNA, 18 nt, synthetic construct
  misc_feature 1..18: note = Targeting Domain
  source 1..18: mol_type = other RNA
ggagcaaggcctatgtga

SEQ ID NO: 730 - RNA, 19 nt, synthetic construct
  misc_feature 1..19: note = Targeting Domain
  source 1..19: mol_type = other RNA
aggagcaaggcctatgtga

SEQ ID NO: 731 - RNA, 20 nt, synthetic construct
  misc_feature 1..20: note = Targeting Domain
  source 1..20: mol_type = other RNA
gaggagcaaggcctatgtga

SEQ ID NO: 732 - RNA, 21 nt, synthetic construct
  misc_feature 1..21: note = Targeting Domain
  source 1..21: mol_type = other RNA
ggaggagcaaggcctatgtga

SEQ ID NO: 733 - RNA, 22 nt, synthetic construct
  misc_feature 1..22: note = Targeting Domain
  source 1..22: mol_type = other RNA
aggaggagcaaggcctatgtga

SEQ ID NO: 734 - RNA, 23 nt, synthetic construct
  misc_feature 1..23: note = Targeting Domain
  source 1..23: mol_type = other RNA
gaggaggagcaaggcctatgtga

SEQ ID NO: 735 - RNA, 24 nt, synthetic construct
  misc_feature 1..24: note = Targeting Domain
  source 1..24: mol_type = other RNA
tgaggaggagcaaggcctatgtga

SEQ ID NO: 736 - RNA, 18 nt, synthetic construct
  misc_feature 1..18: note = Targeting Domain
  source 1..18: mol_type = other RNA
ttcctgggaggtgtccac

SEQ ID NO: 737 - RNA, 19 nt, synthetic construct
  misc_feature 1..19: note = Targeting Domain
  source 1..19: mol_type = other RNA
cttcctgggaggtgtccac

SEQ ID NO: 738 - RNA, 20 nt, synthetic construct
  misc_feature 1..20: note = Targeting Domain
  source 1..20: mol_type = other RNA
gcttcctgggaggtgtccac

SEQ ID NO: 739 - RNA, 21 nt, synthetic construct
  misc_feature 1..21: note = Targeting Domain
  source 1..21: mol_type = other RNA
cgcttcctgggaggtgtccac

SEQ ID NO: 740 - RNA, 22 nt, synthetic construct
  misc_feature 1..22: note = Targeting Domain
  source 1..22: mol_type = other RNA
gcgcttcctgggaggtgtccac

SEQ ID NO: 741 - RNA, 23 nt, synthetic construct
  misc_feature 1..23: note = Targeting Domain
  source 1..23: mol_type = other RNA
agcgcttcctgggaggtgtccac

SEQ ID NO: 742 - RNA, 24 nt, synthetic construct
  misc_feature 1..24: note = Targeting Domain
  source 1..24: mol_type = other RNA
gagcgcttcctgggaggtgtccac

SEQ ID NO: 743 - RNA, 18 nt, synthetic construct
  misc_feature 1..18: note = Targeting Domain
  source 1..18: mol_type = other RNA
gctgtgctgaccatcgac

SEQ ID NO: 744 - RNA, 19 nt, synthetic construct
  misc_feature 1..19: note = Targeting Domain
  source 1..19: mol_type = other RNA
ggctgtgctgaccatcgac

SEQ ID NO: 745 - RNA, 20 nt, synthetic construct
  misc_feature 1..20: note = Targeting Domain
  source 1..20: mol_type = other RNA
aggctgtgctgaccatcgac

SEQ ID NO: 746 - RNA, 21 nt, synthetic construct
  misc_feature 1..21: note = Targeting Domain
  source 1..21: mol_type = other RNA
aaggctgtgctgaccatcgac

SEQ ID NO: 747 - RNA, 22 nt, synthetic construct
  misc_feature 1..22: note = Targeting Domain
  source 1..22: mol_type = other RNA
taaggctgtgctgaccatcgac

SEQ ID NO: 748 - RNA, 23 nt, synthetic construct
  misc_feature 1..23: note = Targeting Domain
  source 1..23: mol_type = other RNA
ataaggctgtgctgaccatcgac

SEQ ID NO: 749 - RNA, 24 nt, synthetic construct
  misc_feature 1..24: note = Targeting Domain
  source 1..24: mol_type = other RNA
cataaggctgtgctgaccatcgac

SEQ ID NO: 750 - RNA, 18 nt, synthetic construct
  misc_feature 1..18: note = Targeting Domain
  source 1..18: mol_type = other RNA
gagcaaggcctatgtgac

SEQ ID NO: 751 - RNA, 19 nt, synthetic construct
  misc_feature 1..19: note = Targeting Domain
  source 1..19: mol_type = other RNA
ggagcaaggcctatgtgac

SEQ ID NO: 752 - RNA, 21 nt, synthetic construct
  misc_feature 1..21: note = Targeting Domain
  source 1..21: mol_type = other RNA
gaggagcaaggcctatgtgac

SEQ ID NO: 753 - RNA, 22 nt, synthetic construct
  misc_feature 1..22: note = Targeting Domain
  source 1..22: mol_type = other RNA
ggaggagcaaggcctatgtgac

SEQ ID NO: 754 - RNA, 23 nt, synthetic construct
  misc_feature 1..23: note = Targeting Domain
  source 1..23: mol_type = other RNA
aggaggagcaaggcctatgtgac

SEQ ID NO: 755 - RNA, 24 nt, synthetic construct
  misc_feature 1..24: note = Targeting Domain
  source 1..24: mol_type = other RNA
gaggaggagcaaggcctatgtgac

SEQ ID NO: 756 - RNA, 18 nt, synthetic construct
  misc_feature 1..18: note = Targeting Domain
  source 1..18: mol_type = other RNA
tacccatgtctatccccc

SEQ ID NO: 757 - RNA, 19 nt, synthetic construct
  misc_feature 1..19: note = Targeting Domain
  source 1..19: mol_type = other RNA
atacccatgtctatccccc

SEQ ID NO: 758 - RNA, 20 nt, synthetic construct
  misc_feature 1..20: note = Targeting Domain
  source 1..20: mol_type = other RNA
catacccatgtctatccccc

SEQ ID NO: 759 - RNA, 21 nt, synthetic construct
  misc_feature 1..21: note = Targeting Domain
  source 1..21: mol_type = other RNA
ccatacccatgtctatccccc

SEQ ID NO: 760 - RNA, 22 nt, synthetic construct
  misc_feature 1..22: note = Targeting Domain
  source 1..22: mol_type = other RNA
gccatacccatgtctatccccc

SEQ ID NO: 761 - RNA, 23 nt, synthetic construct
  misc_feature 1..23: note = Targeting Domain
  source 1..23: mol_type = other RNA
ggccatacccatgtctatccccc

SEQ ID NO: 762 - RNA, 24 nt, synthetic construct
  misc_feature 1..24: note = Targeting Domain
  source 1..24: mol_type = other RNA
aggccatacccatgtctatccccc

SEQ ID NO: 763 - RNA, 18 nt, synthetic construct
  misc_feature 1..18: note = Targeting Domain
  source 1..18: mol_type = other RNA
gcagggccagggccgtcc

SEQ ID NO: 764 - RNA, 19 nt, synthetic construct
  misc_feature 1..19: note = Targeting Domain
  source 1..19: mol_type = other RNA
tgcagggccagggccgtcc

SEQ ID NO: 765 - RNA, 21 nt, synthetic construct
  misc_feature 1..21: note = Targeting Domain
  source 1..21: mol_type = other RNA
tgtgcagggccagggccgtcc

SEQ ID NO: 766 - RNA, 22 nt, synthetic construct
  misc_feature 1..22: note = Targeting Domain
  source 1..22: mol_type = other RNA
atgtgcagggccagggccgtcc

SEQ ID NO: 767 - RNA, 23 nt, synthetic construct
  misc_feature 1..23: note = Targeting Domain
  source 1..23: mol_type = other RNA
gatgtgcagggccagggccgtcc

SEQ ID NO: 768 - RNA, 24 nt, synthetic construct
  misc_feature 1..24: note = Targeting Domain
  source 1..24: mol_type = other RNA
ggatgtgcagggccagggccgtcc

SEQ ID NO: 769 - RNA, 18 nt, synthetic construct
  misc_feature 1..18: note = Targeting Domain
  source 1..18: mol_type = other RNA
gggggagtgagcgcttcc

SEQ ID NO: 770 - RNA, 19 nt, synthetic construct
  misc_feature 1..19: note = Targeting Domain
  source 1..19: mol_type = other RNA
agggggagtgagcgcttcc

SEQ ID NO: 771 - RNA, 21 nt, synthetic construct
  misc_feature 1..21: note = Targeting Domain
  source 1..21: mol_type = other RNA
ccagggggagtgagcgcttcc

SEQ ID NO: 772 - RNA, 22 nt, synthetic construct
  misc_feature 1..22: note = Targeting Domain
  source 1..22: mol_type = other RNA
tccagggggagtgagcgcttcc

SEQ ID NO: 773 - RNA, 23 nt, synthetic construct
  misc_feature 1..23: note = Targeting Domain
  source 1..23: mol_type = other RNA
gtccagggggagtgagcgcttcc

SEQ ID NO: 774 - RNA, 24 nt, synthetic construct
  misc_feature 1..24: note = Targeting Domain
  source 1..24: mol_type = other RNA
cgtccagggggagtgagcgcttcc

SEQ ID NO: 775 - RNA, 18 nt, synthetic construct
  misc_feature 1..18: note = Targeting Domain
  source 1..18: mol_type = other RNA
gtgagccttgctcgaggc

SEQ ID NO: 776 - RNA, 19 nt, synthetic construct
  misc_feature 1..19: note = Targeting Domain
  source 1..19: mol_type = other RNA
cgtgagccttgctcgaggc

SEQ ID NO: 777 - RNA, 20 nt, synthetic construct
  misc_feature 1..20: note = Targeting Domain
  source 1..20: mol_type = other RNA
acgtgagccttgctcgaggc

SEQ ID NO: 778 - RNA, 21 nt, synthetic construct
  misc_feature 1..21: note = Targeting Domain
  source 1..21: mol_type = other RNA
cacgtgagccttgctcgaggc

SEQ ID NO: 779 - RNA, 22 nt, synthetic construct
  misc_feature 1..22: note = Targeting Domain
  source 1..22: mol_type = other RNA
ccacgtgagccttgctcgaggc

SEQ ID NO: 780 - RNA, 23 nt, synthetic construct
  misc_feature 1..23: note = Targeting Domain
  source 1..23: mol_type = other RNA
tccacgtgagccttgctcgaggc

SEQ ID NO: 781 - RNA, 24 nt, synthetic construct
  misc_feature 1..24: note = Targeting Domain
  source 1..24: mol_type = other RNA
gtccacgtgagccttgctcgaggc

SEQ ID NO: 782 - RNA, 18 nt, synthetic construct
  misc_feature 1..18: note = Targeting Domain
  source 1..18: mol_type = other RNA
ggagaggatgtgcagggc

SEQ ID NO: 783 - RNA, 19 nt, synthetic construct
  misc_feature 1..19: note = Targeting Domain
  source 1..19: mol_type = other RNA
gggagaggatgtgcagggc

SEQ ID NO: 784 - RNA, 20 nt, synthetic construct
  misc_feature 1..20: note = Targeting Domain
  source 1..20: mol_type = other RNA
agggagaggatgtgcagggc

SEQ ID NO: 785 - RNA, 21 nt, synthetic construct
  misc_feature 1..21: note = Targeting Domain
  source 1..21: mol_type = other RNA
gagggagaggatgtgcagggc

SEQ ID NO: 786 - RNA, 22 nt, synthetic construct
  misc_feature 1..22: note = Targeting Domain
  source 1..22: mol_type = other RNA
ggagggagaggatgtgcagggc

SEQ ID NO: 787 - RNA, 23 nt, synthetic construct
  misc_feature 1..23: note = Targeting Domain
  source 1..23: mol_type = other RNA
gggagggagaggatgtgcagggc

SEQ ID NO: 788 - RNA, 24 nt, synthetic construct
  misc_feature 1..24: note = Targeting Domain
  source 1..24: mol_type = other RNA
agggagggagaggatgtgcagggc

SEQ ID NO: 789 - RNA, 18 nt, synthetic construct
  misc_feature 1..18: note = Targeting Domain
  source 1..18: mol_type = other RNA
gaaagggactgaagctgc

SEQ ID NO: 790 - RNA, 19 nt, synthetic construct
  misc_feature 1..19: note = Targeting Domain
  source 1..19: mol_type = other RNA
agaaagggactgaagctgc

SEQ ID NO: 791 - RNA, 21 nt, synthetic construct
  misc_feature 1..21: note = Targeting Domain
  source 1..21: mol_type = other RNA
caagaaagggactgaagctgc

SEQ ID NO: 792 - RNA, 22 nt, synthetic construct
  misc_feature 1..22: note = Targeting Domain
  source 1..22: mol_type = other RNA
acaagaaagggactgaagctgc

SEQ ID NO: 793 - RNA, 23 nt, synthetic construct
  misc_feature 1..23: note = Targeting Domain
  source 1..23: mol_type = other RNA
gacaagaaagggactgaagctgc

SEQ ID NO: 794 - RNA, 24 nt, synthetic construct
  misc_feature 1..24: note = Targeting Domain
  source 1..24: mol_type = other RNA
cgacaagaaagggactgaagctgc

SEQ ID NO: 795 - RNA, 18 nt, synthetic construct
  misc_feature 1..18: note = Targeting Domain
  source 1..18: mol_type = other RNA
tgtccacgtgagccttgc

SEQ ID NO: 796 - RNA, 19 nt, synthetic construct
  misc_feature 1..19: note = Targeting Domain
  source 1..19: mol_type = other RNA
gtgtccacgtgagccttgc

SEQ ID NO: 797 - RNA, 20 nt, synthetic construct
  misc_feature 1..20: note = Targeting Domain
  source 1..20: mol_type = other RNA
ggtgtccacgtgagccttgc

SEQ ID NO: 798 - RNA, 21 nt, synthetic construct
  misc_feature 1..21: note = Targeting Domain
  source 1..21: mol_type = other RNA
aggtgtccacgtgagccttgc

SEQ ID NO: 799 - RNA, 22 nt, synthetic construct
  misc_feature 1..22: note = Targeting Domain
  source 1..22: mol_type = other RNA
gaggtgtccacgtgagccttgc

SEQ ID NO: 800 - RNA, 23 nt, synthetic construct
  misc_feature 1..23: note = Targeting Domain
  source 1..23: mol_type = other RNA
ggaggtgtccacgtgagccttgc

SEQ ID NO: 801 - RNA, 24 nt, synthetic construct
  misc_feature 1..24: note = Targeting Domain
  source 1..24: mol_type = other RNA
gggaggtgtccacgtgagccttgc

SEQ ID NO: 802 - RNA, 18 nt, synthetic construct
  misc_feature 1..18: note = Targeting Domain
  source 1..18: mol_type = other RNA
tgcagggccagggccgtc

SEQ ID NO: 803 - RNA, 19 nt, synthetic construct
  misc_feature 1..19: note = Targeting Domain
  source 1..19: mol_type = other RNA
gtgcagggccagggccgtc

SEQ ID NO: 804 - RNA, 20 nt, synthetic construct
  misc_feature 1..20: note = Targeting Domain
  source 1..20: mol_type = other RNA
tgtgcagggccagggccgtc

SEQ ID NO: 805 - RNA, 21 nt, synthetic construct
  misc_feature 1..21: note = Targeting Domain
  source 1..21: mol_type = other RNA
atgtgcagggccagggccgtc

SEQ ID NO: 806 - RNA, 22 nt, synthetic construct
  misc_feature 1..22: note = Targeting Domain
  source 1..22: mol_type = other RNA
gatgtgcagggccagggccgtc

SEQ ID NO: 807 - RNA, 23 nt, synthetic construct
  misc_feature 1..23: note = Targeting Domain
  source 1..23: mol_type = other RNA
ggatgtgcagggccagggccgtc

SEQ ID NO: 808 - RNA, 24 nt, synthetic construct
  misc_feature 1..24: note = Targeting Domain
  source 1..24: mol_type = other RNA
aggatgtgcagggccagggccgtc

SEQ ID NO: 809 - RNA, 18 nt, synthetic construct
  misc_feature 1..18: note = Targeting Domain
  source 1..18: mol_type = other RNA
agggggagtgagcgcttc

SEQ ID NO: 810 - RNA, 19 nt, synthetic construct
  misc_feature 1..19: note = Targeting Domain
  source 1..19: mol_type = other RNA
cagggggagtgagcgcttc

SEQ ID NO: 811 - RNA, 20 nt, synthetic construct
  misc_feature 1..20: note = Targeting Domain
  source 1..20: mol_type = other RNA
ccagggggagtgagcgcttc

SEQ ID NO: 812 - RNA, 21 nt, synthetic construct
  misc_feature 1..21: note = Targeting Domain
  source 1..21: mol_type = other RNA
tccagggggagtgagcgcttc

SEQ ID NO: 813 - RNA, 22 nt, synthetic construct
  misc_feature 1..22: note = Targeting Domain
  source 1..22: mol_type = other RNA
gtccagggggagtgagcgcttc

SEQ ID NO: 814 - RNA, 23 nt, synthetic construct
  misc_feature 1..23: note = Targeting Domain
  source 1..23: mol_type = other RNA
cgtccagggggagtgagcgcttc

SEQ ID NO: 815 - RNA, 24 nt, synthetic construct
  misc_feature 1..24: note = Targeting Domain
  source 1..24: mol_type = other RNA
ccgtccagggggagtgagcgcttc

SEQ ID NO: 816 - RNA, 18 nt, synthetic construct
  misc_feature 1..18: note = Targeting Domain
  source 1..18: mol_type = other RNA
accaagtctcccctcttc

SEQ ID NO: 817 - RNA, 19 nt, synthetic construct
  misc_feature 1..19: note = Targeting Domain
  source 1..19: mol_type = other RNA
taccaagtctcccctcttc

SEQ ID NO: 818 - RNA, 20 nt, synthetic construct
  misc_feature 1..20: note = Targeting Domain
  source 1..20: mol_type = other RNA
ataccaagtctcccctcttc

SEQ ID NO: 819 - RNA, 21 nt, synthetic construct
  misc_feature 1..21: note = Targeting Domain
  source 1..21: mol_type = other RNA
aataccaagtctcccctcttc

SEQ ID NO: 820 - RNA, 22 nt, synthetic construct
  misc_feature 1..22: note = Targeting Domain
  source 1..22: mol_type = other RNA
aaataccaagtctcccctcttc

SEQ ID NO: 821 - RNA, 23 nt, synthetic construct
  misc_feature 1..23: note = Targeting Domain
  source 1..23: mol_type = other RNA
aaaataccaagtctcccctcttc

SEQ ID NO: 822 - RNA, 24 nt, synthetic construct
  misc_feature 1..24: note = Targeting Domain
  source 1..24: mol_type = other RNA
caaaataccaagtctcccctcttc

SEQ ID NO: 823 - RNA, 18 nt, synthetic construct
  misc_feature 1..18: note = Targeting Domain
  source 1..18: mol_type = other RNA
agggccagggccgtccag

SEQ ID NO: 824 - RNA, 19 nt, synthetic construct
  misc_feature 1..19: note = Targeting Domain
  source 1..19: mol_type = other RNA
cagggccagggccgtccag

SEQ ID NO: 825 - RNA, 21 nt, synthetic construct
  misc_feature 1..21: note = Targeting Domain
  source 1..21: mol_type = other RNA
tgcagggccagggccgtccag

SEQ ID NO: 826 - RNA, 22 nt, synthetic construct
  misc_feature 1..22: note = Targeting Domain
  source 1..22: mol_type = other RNA
gtgcagggccagggccgtccag

SEQ ID NO: 827 - RNA, 23 nt, synthetic construct
  misc_feature 1..23: note = Targeting Domain
  source 1..23: mol_type = other RNA
tgtgcagggccagggccgtccag

SEQ ID NO: 828 - RNA, 24 nt, synthetic construct
  misc_feature 1..24: note = Targeting Domain
  source 1..24: mol_type = other RNA
atgtgcagggccagggccgtccag

SEQ ID NO: 829 - RNA, 18 nt, synthetic construct
  misc_feature 1..18: note = Targeting Domain
  source 1..18: mol_type = other RNA
caaggcctatgtgacagg

SEQ ID NO: 830 - RNA, 19 nt, synthetic construct
  misc_feature 1..19: note = Targeting Domain
  source 1..19: mol_type = other RNA
gcaaggcctatgtgacagg

SEQ ID NO: 831 - RNA, 20 nt, synthetic construct
  misc_feature 1..20: note = Targeting Domain
  source 1..20: mol_type = other RNA
agcaaggcctatgtgacagg

SEQ ID NO: 832 - RNA, 21 nt, synthetic construct
  misc_feature 1..21: note = Targeting Domain
  source 1..21: mol_type = other RNA
gagcaaggcctatgtgacagg

SEQ ID NO: 833 - RNA, 22 nt, synthetic construct
  misc_feature 1..22: note = Targeting Domain
  source 1..22: mol_type = other RNA
ggagcaaggcctatgtgacagg

SEQ ID NO: 834 - RNA, 23 nt, synthetic construct
  misc_feature 1..23: note = Targeting Domain
  source 1..23: mol_type = other RNA
aggagcaaggcctatgtgacagg

SEQ ID NO: 835 - RNA, 24 nt, synthetic construct
  misc_feature 1..24: note = Targeting Domain
  source 1..24: mol_type = other RNA
gaggagcaaggcctatgtgacagg

SEQ ID NO: 836 - RNA, 18 nt, synthetic construct
  misc_feature 1..18: note = Targeting Domain
  source 1..18: mol_type = other RNA
gcctatgtgacagggagg

SEQ ID NO: 837 - RNA, 19 nt, synthetic construct
  misc_feature 1..19: note = Targeting Domain
  source 1..19: mol_type = other RNA
ggcctatgtgacagggagg

SEQ ID NO: 838 - RNA, 20 nt, synthetic construct
  misc_feature 1..20: note = Targeting Domain
  source 1..20: mol_type = other RNA
aggcctatgtgacagggagg

SEQ ID NO: 839 - RNA, 21 nt, synthetic construct
  misc_feature 1..21: note = Targeting Domain
  source 1..21: mol_type = other RNA
aaggcctatgtgacagggagg

SEQ ID NO: 840 - RNA, 22 nt, synthetic construct
  misc_feature 1..22: note = Targeting Domain
  source 1..22: mol_type = other RNA
caaggcctatgtgacagggagg

SEQ ID NO: 841 - RNA, 23 nt, synthetic construct
  misc_feature 1..23: note = Targeting Domain
  source 1..23: mol_type = other RNA
gcaaggcctatgtgacagggagg

SEQ ID NO: 842 - RNA, 24 nt, synthetic construct
  misc_feature 1..24: note = Targeting Domain
  source 1..24: mol_type = other RNA
agcaaggcctatgtgacagggagg

SEQ ID NO: 843 - RNA, 18 nt, synthetic construct
  misc_feature 1..18: note = Targeting Domain
  source 1..18: mol_type = other RNA
tcagccaaagccttgagg

SEQ ID NO: 844 - RNA, 19 nt, synthetic construct
  misc_feature 1..19: note = Targeting Domain
  source 1..19: mol_type = other RNA
atcagccaaagccttgagg

SEQ ID NO: 845 - RNA, 18 nt, synthetic construct
  misc_feature 1..18: note = Targeting Domain
  source 1..18: mol_type = other RNA
aaggcctatgtgacaggg

SEQ ID NO: 846 - RNA, 19 nt, synthetic construct
  misc_feature 1..19: note = Targeting Domain
  source 1..19: mol_type = other RNA
caaggcctatgtgacaggg

SEQ ID NO: 847 - RNA, 21 nt, synthetic construct
  misc_feature 1..21: note = Targeting Domain
  source 1..21: mol_type = other RNA
agcaaggcctatgtgacaggg

SEQ ID NO: 848 - RNA, 22 nt, synthetic construct
  misc_feature 1..22: note = Targeting Domain
  source 1..22: mol_type = other RNA
gagcaaggcctatgtgacaggg

SEQ ID NO: 849 - RNA, 23 nt, synthetic construct
  misc_feature 1..23: note = Targeting Domain
  source 1..23: mol_type = other RNA
ggagcaaggcctatgtgacaggg

SEQ ID NO: 850 - RNA, 24 nt, synthetic construct
  misc_feature 1..24: note = Targeting Domain
  source 1..24: mol_type = other RNA
aggagcaaggcctatgtgacaggg

SEQ ID NO: 851 - RNA, 18 nt, synthetic construct
  misc_feature 1..18: note = Targeting Domain
  source 1..18: mol_type = other RNA
agaaagggactgaagctg

SEQ ID NO: 852 - RNA, 19 nt, synthetic construct
  misc_feature 1..19: note = Targeting Domain
  source 1..19: mol_type = other RNA
aagaaagggactgaagctg

SEQ ID NO: 853 - RNA, 20 nt, synthetic construct
  misc_feature 1..20: note = Targeting Domain
  source 1..20: mol_type = other RNA
caagaaagggactgaagctg

SEQ ID NO: 854 - RNA, 21 nt, synthetic construct
  misc_feature 1..21: note = Targeting Domain
  source 1..21: mol_type = other RNA
acaagaaagggactgaagctg

SEQ ID NO: 855 - RNA, 22 nt, synthetic construct
  misc_feature 1..22: note = Targeting Domain
  source 1..22: mol_type = other RNA
gacaagaaagggactgaagctg

SEQ ID NO: 856 - RNA, 23 nt, synthetic construct
  misc_feature 1..23: note = Targeting Domain
  source 1..23: mol_type = other RNA
cgacaagaaagggactgaagctg

SEQ ID NO: 857 - RNA, 24 nt, synthetic construct
  misc_feature 1..24: note = Targeting Domain
  source 1..24: mol_type = other RNA
tcgacaagaaagggactgaagctg

SEQ ID NO: 858 - RNA, 18 nt, synthetic construct
  misc_feature 1..18: note = Targeting Domain
  source 1..18: mol_type = other RNA
agggagggagaggatgtg

SEQ ID NO: 859 - RNA, 19 nt, synthetic construct
  misc_feature 1..19: note = Targeting Domain
  source 1..19: mol_type = other RNA
cagggagggagaggatgtg

SEQ ID NO: 860 - RNA, 20 nt, synthetic construct
  misc_feature 1..20: note = Targeting Domain
  source 1..20: mol_type = other RNA
acagggagggagaggatgtg

SEQ ID NO: 861 - RNA, 21 nt, synthetic construct
  misc_feature 1..21: note = Targeting Domain
  source 1..21: mol_type = other RNA
gacagggagggagaggatgtg

SEQ ID NO: 862 - RNA, 22 nt, synthetic construct
  misc_feature 1..22: note = Targeting Domain
  source 1..22: mol_type = other RNA
tgacagggagggagaggatgtg

SEQ ID NO: 863 - RNA, 23 nt, synthetic construct
  misc_feature 1..23: note = Targeting Domain
  source 1..23: mol_type = other RNA
gtgacagggagggagaggatgtg

SEQ ID NO: 864 - RNA, 24 nt, synthetic construct
  misc_feature 1..24: note = Targeting Domain
  source 1..24: mol_type = other RNA
tgtgacagggagggagaggatgtg

SEQ ID NO: 865 - RNA, 18 nt, synthetic construct
  misc_feature 1..18: note = Targeting Domain
  source 1..18: mol_type = other RNA
caagtctcccctcttcat

SEQ ID NO: 866 - RNA, 19 nt, synthetic construct
  misc_feature 1..19: note = Targeting Domain
  source 1..19: mol_type = other RNA
ccaagtctcccctcttcat

SEQ ID NO: 867 - RNA, 21 nt, synthetic construct
  misc_feature 1..21: note = Targeting Domain
  source 1..21: mol_type = other RNA
taccaagtctcccctcttcat

SEQ ID NO: 868 - RNA, 22 nt, synthetic construct
  misc_feature 1..22: note = Targeting Domain
  source 1..22: mol_type = other RNA
ataccaagtctcccctcttcat

SEQ ID NO: 869 - RNA, 23 nt, synthetic construct
  misc_feature 1..23: note = Targeting Domain
  source 1..23: mol_type = other RNA
aataccaagtctcccctcttcat

SEQ ID NO: 870 - RNA, 24 nt, synthetic construct
  misc_feature 1..24: note = Targeting Domain
  source 1..24: mol_type = other RNA
aaataccaagtctcccctcttcat

SEQ ID NO: 871 - RNA, 18 nt, synthetic construct
  misc_feature 1..18: note = Targeting Domain
  source 1..18: mol_type = other RNA
ggggagtgagcgcttcct

SEQ ID NO: 872 - RNA, 19 nt, synthetic construct
  misc_feature 1..19: note = Targeting Domain
  source 1..19: mol_type = other RNA
gggggagtgagcgcttcct

SEQ ID NO: 873 - RNA, 21 nt, synthetic construct
  misc_feature 1..21: note = Targeting Domain
  source 1..21: mol_type = other RNA
cagggggagtgagcgcttcct

SEQ ID NO: 874 - RNA, 22 nt, synthetic construct
  misc_feature 1..22: note = Targeting Domain
  source 1..22: mol_type = other RNA
ccagggggagtgagcgcttcct

SEQ ID NO: 875 - RNA, 23 nt, synthetic construct
  misc_feature 1..23: note = Targeting Domain
  source 1..23: mol_type = other RNA
tccagggggagtgagcgcttcct

SEQ ID NO: 876 - RNA, 24 nt, synthetic construct
  misc_feature 1..24: note = Targeting Domain
  source 1..24: mol_type = other RNA
gtccagggggagtgagcgcttcct

SEQ ID NO: 877 - RNA, 18 nt, synthetic construct
  misc_feature 1..18: note = Targeting Domain
  source 1..18: mol_type = other RNA
ctgctggggccatgtttt

SEQ ID NO: 878 - RNA, 19 nt, synthetic construct
  misc_feature 1..19: note = Targeting Domain
  source 1..19: mol_type = other RNA
gctgctggggccatgtttt

SEQ ID NO: 879 - RNA, 20 nt, synthetic construct
  misc_feature 1..20: note = Targeting Domain
  source 1..20: mol_type = other RNA
agctgctggggccatgtttt

SEQ ID NO: 880 - RNA, 21 nt, synthetic construct
  misc_feature 1..21: note = Targeting Domain
  source 1..21: mol_type = other RNA
aagctgctggggccatgtttt

SEQ ID NO: 881 - RNA, 22 nt, synthetic construct
  misc_feature 1..22: note = Targeting Domain
  source 1..22: mol_type = other RNA
gaagctgctggggccatgtttt

SEQ ID NO: 882 - RNA, 23 nt, synthetic construct
  misc_feature 1..23: note = Targeting Domain
  source 1..23: mol_type = other RNA
tgaagctgctggggccatgtttt

SEQ ID NO: 883 - RNA, 24 nt, synthetic construct
  misc_feature 1..24: note = Targeting Domain
  source 1..24: mol_type = other RNA
ctgaagctgctggggccatgtttt

SEQ ID NO: 884 - RNA, 20 nt, synthetic construct
  misc_feature 1..20: note = Targeting Domain
  source 1..20: mol_type = other RNA
gaatttcttttctgcacgac

SEQ ID NO: 885 - RNA, 20 nt, synthetic construct
  misc_feature 1..20: note = Targeting Domain
  source 1..20: mol_type = other RNA
cagatcataggttccagtaa

SEQ ID NO: 886 - RNA, 20 nt, synthetic construct
  misc_feature 1..20: note = Targeting Domain
  source 1..20: mol_type = other RNA
ttacccaaactgtccattac

SEQ ID NO: 887 - RNA, 20 nt, synthetic construct
  misc_feature 1..20: note = Targeting Domain
  source 1..20: mol_type = other RNA
ctatgatctgaagagcgtcc

SEQ ID NO: 888 - RNA, 20 nt, synthetic construct
  misc_feature 1..20: note = Targeting Domain
  source 1..20: mol_type = other RNA
cagtttgggtaaatgtaagc

SEQ ID NO: 889 - RNA, 20 nt, synthetic construct
  misc_feature 1..20: note = Targeting Domain
  source 1..20: mol_type = other RNA
ctcaccttggagagcttcag

SEQ ID NO: 890 - RNA, 20 nt, synthetic construct
  misc_feature 1..20: note = Targeting Domain
  source 1..20: mol_type = other RNA
caatggggctgacctctccg

SEQ ID NO: 891 - RNA, 20 nt, synthetic construct
  misc_feature 1..20: note = Targeting Domain
  source 1..20: mol_type = other RNA
aagagcgtcctgggtcaact

SEQ ID NO: 892 - RNA, 20 nt, synthetic construct
  misc_feature 1..20: note = Targeting Domain
  source 1..20: mol_type = other RNA
tatgatctgaagagcgtcct

SEQ ID NO: 893 - RNA, 17 nt, synthetic construct
  misc_feature 1..17: note = Targeting Domain
  source 1..17: mol_type = other RNA
gtgcaacaaggtcgtca

SEQ ID NO: 894 - RNA, 17 nt, synthetic construct
  misc_feature 1..17: note = Targeting Domain
  source 1..17: mol_type = other RNA
gagcgtcctgggtcaac

SEQ ID NO: 895 - RNA, 17 nt, synthetic construct
  misc_feature 1..17: note = Targeting Domain
  source 1..17: mol_type = other RNA
ggtgcaacaaggtcgtc

SEQ ID NO: 896 - RNA, 17 nt, synthetic construct
  misc_feature 1..17: note = Targeting Domain
  source 1..17: mol_type = other RNA
gacgctcttcagatcat

SEQ ID NO: 897 - RNA, 17 nt, synthetic construct
  misc_feature 1..17: note = Targeting Domain
  source 1..17: mol_type = other RNA
gatctgaagagcgtcct

SEQ ID NO: 898 - RNA, 20 nt, synthetic construct
  misc_feature 1..20: note = Targeting Domain
  source 1..20: mol_type = other RNA
ggcacccctgaagctctcca

SEQ ID NO: 899 - RNA, 20 nt, synthetic construct
  misc_feature 1..20: note = Targeting Domain
  source 1..20: mol_type = other RNA
gggtcaactgggcatcacta

SEQ ID NO: 900 - RNA, 20 nt, synthetic construct
  misc_feature 1..20: note = Targeting Domain
  source 1..20: mol_type = other RNA
gaagagcgtcctgggtcaac

SEQ ID NO: 901 - RNA, 20 nt, synthetic construct
  misc_feature 1..20: note = Targeting Domain
  source 1..20: mol_type = other RNA
gggtgcctcctctgtgaccc

SEQ ID NO: 902 - RNA, 20 nt, synthetic construct
  misc_feature 1..20: note = Targeting Domain
  source 1..20: mol_type = other RNA
gcaatggggctgacctctcc

SEQ ID NO: 903 - RNA, 20 nt, synthetic construct
  misc_feature 1..20: note = Targeting Domain
  source 1..20: mol_type = other RNA
ggttccagtaatggacagtt

SEQ ID NO: 904 - RNA, 20 nt, synthetic construct
  misc_feature 1..20: note = Targeting Domain
  source 1..20: mol_type = other RNA
gttccagtaatggacagttt

SEQ ID NO: 905 - RNA, 17 nt, synthetic construct
  misc_feature 1..17: note = Targeting Domain
  source 1..17: mol_type = other RNA
actaaggtcttcagcaa

SEQ ID NO: 906 - RNA, 17 nt, synthetic construct
  misc_feature 1..17: note = Targeting Domain
  source 1..17: mol_type = other RNA
atcataggttccagtaa

SEQ ID NO: 907 - RNA, 17 nt, synthetic construct
  misc_feature 1..17: note = Targeting Domain
  source 1..17: mol_type = other RNA
acccctgaagctctcca

SEQ ID NO: 908 - RNA, 17 nt, synthetic construct
  misc_feature 1..17: note = Targeting Domain
  source 1..17: mol_type = other RNA
tgcagaaaagaaattca

SEQ ID NO: 909 - RNA, 17 nt, synthetic construct
  misc_feature 1..17: note = Targeting Domain
  source 1..17: mol_type = other RNA
caccttggagagcttca

SEQ ID NO: 910 - RNA, 17 nt, synthetic construct
  misc_feature 1..17: note = Targeting Domain
  source 1..17: mol_type = other RNA
tcaactgggcatcacta

SEQ ID NO: 911 - RNA, 17 nt, synthetic construct
  misc_feature 1..17: note = Targeting Domain
  source 1..17: mol_type = other RNA
tttcttttctgcacgac

SEQ ID NO: 912 - RNA, 17 nt, synthetic construct
  misc_feature 1..17: note = Targeting Domain
  source 1..17: mol_type = other RNA
cccaaactgtccattac

SEQ ID NO: 913 - RNA, 17 nt, synthetic construct
  misc_feature 1..17: note = Targeting Domain
  source 1..17: mol_type = other RNA
tgcctcctctgtgaccc

SEQ ID NO: 914 - RNA, 17 nt, synthetic construct
  misc_feature 1..17: note = Targeting Domain
  source 1..17: mol_type = other RNA
tgatgcccagttgaccc

SEQ ID NO: 915 - RNA, 17 nt, synthetic construct
  misc_feature 1..17: note = Targeting Domain
  source 1..17: mol_type = other RNA
atggggctgacctctcc

SEQ ID NO: 916 - RNA, 17 nt, synthetic construct
  misc_feature 1..17: note = Targeting Domain
  source 1..17: mol_type = other RNA
tgatctgaagagcgtcc

SEQ ID NO: 917 - RNA, 17 nt, synthetic construct
  misc_feature 1..17: note = Targeting Domain
  source 1..17: mol_type = other RNA
tttgggtaaatgtaagc

SEQ ID NO: 918 - RNA, 17 nt, synthetic construct
  misc_feature 1..17: note = Targeting Domain
  source 1..17: mol_type = other RNA
aatggggctgacctctc

SEQ ID NO: 919 - RNA, 17 nt, synthetic construct
  misc_feature 1..17: note = Targeting Domain
  source 1..17: mol_type = other RNA
tcaccttggagagcttc

SEQ ID NO: 920 - RNA, 17 nt, synthetic construct
  misc_feature 1..17: note = Targeting Domain
  source 1..17: mol_type = other RNA
cctctccggggtcacag

SEQ ID NO: 921 - RNA, 17 nt, synthetic construct
  misc_feature 1..17: note = Targeting Domain
  source 1..17: mol_type = other RNA
accttggagagcttcag

SEQ ID NO: 922 - RNA, 17 nt, synthetic construct
  misc_feature 1..17: note = Targeting Domain
  source 1..17: mol_type = other RNA
cctctgtgaccccggag

SEQ ID NO: 923 - RNA, 17 nt, synthetic construct
  misc_feature 1..17: note = Targeting Domain
  source 1..17: mol_type = other RNA
tggggctgacctctccg

SEQ ID NO: 924 - RNA, 17 nt, synthetic construct
  misc_feature 1..17: note = Targeting Domain
  source 1..17: mol_type = other RNA
ctccggggtcacagagg

SEQ ID NO: 925 - RNA, 17 nt, synthetic construct
  misc_feature 1..17: note = Targeting Domain
  source 1..17: mol_type = other RNA
taaggtcttcagcaatg

SEQ ID NO: 926 - RNA, 17 nt, synthetic construct
  misc_feature 1..17: note = Targeting Domain
  source 1..17: mol_type = other RNA
ctaaggtcttcagcaat

SEQ ID NO: 927 - RNA, 17 nt, synthetic construct
  misc_feature 1..17: note = Targeting Domain
  source 1..17: mol_type = other RNA
agcgtcctgggtcaact

SEQ ID NO: 928 - RNA, 17 nt, synthetic construct
  misc_feature 1..17: note = Targeting Domain
  source 1..17: mol_type = other RNA
tcagggtgatctcacct

SEQ ID NO: 929 - RNA, 17 nt, synthetic construct
  misc_feature 1..17: note = Targeting Domain
  source 1..17: mol_type = other RNA
tccagtaatggacagtt

SEQ ID NO: 930 - RNA, 17 nt, synthetic construct
  misc_feature 1..17: note = Targeting Domain
  source 1..17: mol_type = other RNA
ccagtaatggacagttt

SEQ ID NO: 931 - RNA, 20 nt, synthetic construct
  misc_feature 1..20: note = Targeting Domain
  source 1..20: mol_type = other RNA
atcactaaggtcttcagcaa

SEQ ID NO: 932 - RNA, 20 nt, synthetic construct
  misc_feature 1..20: note = Targeting Domain
  source 1..20: mol_type = other RNA
tcgtgcagaaaagaaattca

SEQ ID NO: 933 - RNA, 20 nt, synthetic construct
  misc_feature 1..20: note = Targeting Domain
  source 1..20: mol_type = other RNA
tctcaccttggagagcttca

SEQ ID NO: 934 - RNA, 20 nt, synthetic construct
  misc_feature 1..20: note = Targeting Domain
  source 1..20: mol_type = other RNA
tagtgatgcccagttgaccc

SEQ ID NO: 935 - RNA, 20 nt, synthetic construct
  misc_feature 1..20: note = Targeting Domain
  source 1..20: mol_type = other RNA
agcaatggggctgacctctc

SEQ ID NO: 936 - RNA, 20 nt, synthetic construct
  misc_feature 1..20: note = Targeting Domain
  source 1..20: mol_type = other RNA
atctcaccttggagagcttc

SEQ ID NO: 937 - RNA, 20 nt, synthetic construct
  misc_feature 1..20: note = Targeting Domain
  source 1..20: mol_type = other RNA
tgacctctccggggtcacag

SEQ ID NO: 938 - RNA, 20 nt, synthetic construct
  misc_feature 1..20: note = Targeting Domain
  source 1..20: mol_type = other RNA
cctcctctgtgaccccggag

SEQ ID NO: 939 - RNA, 20 nt, synthetic construct
  misc_feature 1..20: note = Targeting Domain
  source 1..20: mol_type = other RNA
cctctccggggtcacagagg

SEQ ID NO: 940 - RNA, 20 nt, synthetic construct
  misc_feature 1..20: note = Targeting Domain
  source 1..20: mol_type = other RNA
cactaaggtcttcagcaatg

SEQ ID NO: 941 - RNA, 20 nt, synthetic construct
  misc_feature 1..20: note = Targeting Domain
  source 1..20: mol_type = other RNA
tcactaaggtcttcagcaat

SEQ ID NO: 942 - RNA, 20 nt, synthetic construct
  misc_feature 1..20: note = Targeting Domain
  source 1..20: mol_type = other RNA
caggacgctcttcagatcat

SEQ ID NO: 943 - RNA, 20 nt, synthetic construct
  misc_feature 1..20: note = Targeting Domain
  source 1..20: mol_type = other RNA
tcgtcagggtgatctcacct

SEQ ID NO: 944 - RNA, 21 nt, synthetic construct
  misc_feature 1..21: note = Targeting Domain
  source 1..21: mol_type = other RNA
gatctcaccttggagagcttc

SEQ ID NO: 945 - RNA, 23 nt, synthetic construct
  misc_feature 1..23: note = Targeting Domain
  source 1..23: mol_type = other RNA
gtgatctcaccttggagagcttc

SEQ ID NO: 946 - RNA, 24 nt, synthetic construct
  misc_feature 1..24: note = Targeting Domain
  source 1..24: mol_type = other RNA
ggtgatctcaccttggagagcttc

SEQ ID NO: 947 - RNA, 19 nt, synthetic construct
  misc_feature 1..19: note = Targeting Domain
  source 1..19: mol_type = other RNA
gcaatggggctgacctctc

SEQ ID NO: 948 - RNA, 23 nt, synthetic construct
  misc_feature 1..23: note = Targeting Domain
  source 1..23: mol_type = other RNA
gaacctatgatctgaagagcgtc

SEQ ID NO: 949 - RNA, 24 nt, synthetic construct
  misc_feature 1..24: note = Targeting Domain
  source 1..24: mol_type = other RNA
ggaacctatgatctgaagagcgtc

SEQ ID NO: 950 - RNA, 22 nt, synthetic construct
  misc_feature 1..22: note = Targeting Domain
  source 1..22: mol_type = other RNA
tgatctcaccttggagagcttc

SEQ ID NO: 951 - RNA, 21 nt, synthetic construct
  misc_feature 1..21: note = Targeting Domain
  source 1..21: mol_type = other RNA
taggttccagtaatggacagt

SEQ ID NO: 952 - RNA, 22 nt, synthetic construct
  misc_feature 1..22: note = Targeting Domain
  source 1..22: mol_type = other RNA
ataggttccagtaatggacagt

SEQ ID NO: 953 - RNA, 23 nt, synthetic construct
  misc_feature 1..23: note = Targeting Domain
  source 1..23: mol_type = other RNA
cataggttccagtaatggacagt

SEQ ID NO: 954 - RNA, 24 nt, synthetic construct
  misc_feature 1..24: note = Targeting Domain
  source 1..24: mol_type = other RNA
tcataggttccagtaatggacagt

SEQ ID NO: 955 - RNA, 18 nt, synthetic construct
  misc_feature 1..18: note = Targeting Domain
  source 1..18: mol_type = other RNA
caatggggctgacctctc

SEQ ID NO: 956 - RNA, 21 nt, synthetic construct
  misc_feature 1..21: note = Targeting Domain
  source 1..21: mol_type = other RNA
cagcaatggggctgacctctc

SEQ ID NO: 957 - RNA, 22 nt, synthetic construct
  misc_feature 1..22: note = Targeting Domain
  source 1..22: mol_type = other RNA
tcagcaatggggctgacctctc

SEQ ID NO: 958 - RNA, 23 nt, synthetic construct
  misc_feature 1..23: note = Targeting Domain
  source 1..23: mol_type = other RNA
ttcagcaatggggctgacctctc

SEQ ID NO: 959 - RNA, 24 nt, synthetic construct
  misc_feature 1..24: note = Targeting Domain
  source 1..24: mol_type = other RNA
cttcagcaatggggctgacctctc

SEQ ID NO: 960 - RNA, 18 nt, synthetic construct
  misc_feature 1..18: note = Targeting Domain
  source 1..18: mol_type = other RNA
tatgatctgaagagcgtc

SEQ ID NO: 961 - RNA, 19 nt, synthetic construct
  misc_feature 1..19: note = Targeting Domain
  source 1..19: mol_type = other RNA
ctatgatctgaagagcgtc

SEQ ID NO: 962 - RNA, 20 nt, synthetic construct
  misc_feature 1..20: note = Targeting Domain
  source 1..20: mol_type = other RNA
cctatgatctgaagagcgtc

SEQ ID NO: 963 - RNA, 21 nt, synthetic construct
  misc_feature 1..21: note = Targeting Domain
  source 1..21: mol_type = other RNA
acctatgatctgaagagcgtc

SEQ ID NO: 964 - RNA, 22 nt, synthetic construct
  misc_feature 1..22: note = Targeting Domain
  source 1..22: mol_type = other RNA
aacctatgatctgaagagcgtc

SEQ ID NO: 965 - RNA, 18 nt, synthetic construct
  misc_feature 1..18: note = Targeting Domain
  source 1..18: mol_type = other RNA
gttccagtaatggacagt

SEQ ID NO: 966 - RNA, 19 nt, synthetic construct
  misc_feature 1..19: note = Targeting Domain
  source 1..19: mol_type = other RNA
ggttccagtaatggacagt

SEQ ID NO: 967 - RNA, 18 nt, synthetic construct
  misc_feature 1..18: note = Targeting Domain
  source 1..18: mol_type = other RNA
ctcaccttggagagcttc

SEQ ID NO: 968 - RNA, 19 nt, synthetic construct
  misc_feature 1..19: note = Targeting Domain
  source 1..19: mol_type = other RNA
tctcaccttggagagcttc

SEQ ID NO: 969 - RNA, 20 nt, synthetic construct
  misc_feature 1..20: note = Targeting Domain
  source 1..20: mol_type = other RNA
aggttccagtaatggacagt

SEQ ID NO: 970 - RNA, 18 nt, synthetic construct
  misc_feature 1..18: note = Targeting Domain
  source 1..18: mol_type = other RNA
cagacctgtcgtgcagaa

SEQ ID NO: 971 - RNA, 19 nt, synthetic construct
  misc_feature 1..19: note = Targeting Domain
  source 1..19: mol_type = other RNA
gcagacctgtcgtgcagaa

SEQ ID NO: 972 - RNA, 20 nt, synthetic construct
  misc_feature 1..20: note = Targeting Domain
  source 1..20: mol_type = other RNA
ggcagacctgtcgtgcagaa

SEQ ID NO: 973 - RNA, 21 nt, synthetic construct
  misc_feature 1..21: note = Targeting Domain
  source 1..21: mol_type = other RNA
tggcagacctgtcgtgcagaa

SEQ ID NO: 974 - RNA, 22 nt, synthetic construct
  misc_feature 1..22: note = Targeting Domain
  source 1..22: mol_type = other RNA
ctggcagacctgtcgtgcagaa

SEQ ID NO: 975 - RNA, 23 nt, synthetic construct
  misc_feature 1..23: note = Targeting Domain
  source 1..23: mol_type = other RNA
gctggcagacctgtcgtgcagaa

SEQ ID NO: 976 - RNA, 24 nt, synthetic construct
  misc_feature 1..24: note = Targeting Domain
  source 1..24: mol_type = other RNA
agctggcagacctgtcgtgcagaa

SEQ ID NO: 977 - RNA, 18 nt, synthetic construct
  misc_feature 1..18: note = Targeting Domain
  source 1..18: mol_type = other RNA
agatcataggttccagta

SEQ ID NO: 978 - RNA, 19 nt, synthetic construct
  misc_feature 1..19: note = Targeting Domain
  source 1..19: mol_type = other RNA
cagatcataggttccagta

SEQ ID NO: 979 - RNA, 20 nt, synthetic construct
  misc_feature 1..20: note = Targeting Domain
  source 1..20: mol_type = other RNA
tcagatcataggttccagta

SEQ ID NO: 980 - RNA, 21 nt, synthetic construct
  misc_feature 1..21: note = Targeting Domain
  source 1..21: mol_type = other RNA
ttcagatcataggttccagta

SEQ ID NO: 981 - RNA, 22 nt, synthetic construct
  misc_feature 1..22: note = Targeting Domain
  source 1..22: mol_type = other RNA
cttcagatcataggttccagta

SEQ ID NO: 982 - RNA, 23 nt, synthetic construct
  misc_feature 1..23: note = Targeting Domain
  source 1..23: mol_type = other RNA
tcttcagatcataggttccagta

SEQ ID NO: 983 - RNA, 24 nt, synthetic construct
  misc_feature 1..24: note = Targeting Domain
  source 1..24: mol_type = other RNA
ctcttcagatcataggttccagta

SEQ ID NO: 984 - RNA, 18 nt, synthetic construct
  misc_feature 1..18: note = Targeting Domain
  source 1..18: mol_type = other RNA
cgtcagggtgatctcacc

SEQ ID NO: 985 - RNA, 19 nt, synthetic construct
  misc_feature 1..19: note = Targeting Domain
  source 1..19: mol_type = other RNA
tcgtcagggtgatctcacc

SEQ ID NO: 986 - RNA, 20 nt, synthetic construct
  misc_feature 1..20: note = Targeting Domain
  source 1..20: mol_type = other RNA
gtcgtcagggtgatctcacc

SEQ ID NO: 987 - RNA, 21 nt, synthetic construct
  misc_feature 1..21: note = Targeting Domain
  source 1..21: mol_type = other RNA
ggtcgtcagggtgatctcacc

SEQ ID NO: 988 - RNA, 22 nt, synthetic construct
  misc_feature 1..22: note = Targeting Domain
  source 1..22: mol_type = other RNA
aggtcgtcagggtgatctcacc

SEQ ID NO: 989 - RNA, 23 nt, synthetic construct
  misc_feature 1..23: note = Targeting Domain
  source 1..23: mol_type = other RNA
aaggtcgtcagggtgatctcacc

SEQ ID NO: 990 - RNA, 24 nt, synthetic construct
  misc_feature 1..24: note = Targeting Domain
  source 1..24: mol_type = other RNA
caaggtcgtcagggtgatctcacc

SEQ ID NO: 991 - RNA, 18 nt, synthetic construct
  misc_feature 1..18: note = Targeting Domain
  source 1..18: mol_type = other RNA
ggtgcctcctctgtgacc

SEQ ID NO: 992 - RNA, 19 nt, synthetic construct
  misc_feature 1..19: note = Targeting Domain
  source 1..19: mol_type = other RNA
gggtgcctcctctgtgacc

SEQ ID NO: 993 - RNA, 20 nt, synthetic construct
  misc_feature 1..20: note = Targeting Domain
  source 1..20: mol_type = other RNA
ggggtgcctcctctgtgacc

SEQ ID NO: 994 - RNA, 21 nt, synthetic construct
  misc_feature 1..21: note = Targeting Domain
  source 1..21: mol_type = other RNA
aggggtgcctcctctgtgacc

SEQ ID NO: 995 - RNA, 22 nt, synthetic construct
  misc_feature 1..22: note = Targeting Domain
  source 1..22: mol_type = other RNA
caggggtgcctcctctgtgacc

SEQ ID NO: 996 - RNA, 23 nt, synthetic construct
  misc_feature 1..23: note = Targeting Domain
  source 1..23: mol_type = other RNA
tcaggggtgcctcctctgtgacc

SEQ ID NO: 997 - RNA, 24 nt, synthetic construct
  misc_feature 1..24: note = Targeting Domain
  source 1..24: mol_type = other RNA
ttcaggggtgcctcctctgtgacc

SEQ ID NO: 998 - RNA, 18 nt, synthetic construct
  misc_feature 1..18: note = Targeting Domain
  source 1..18: mol_type = other RNA
agtgatgcccagttgacc

SEQ ID NO: 999 - RNA, 19 nt, synthetic construct
  misc_feature 1..19: note = Targeting Domain
  source 1..19: mol_type = other RNA
tagtgatgcccagttgacc

SEQ ID NO: 1000 - RNA, 20 nt, synthetic construct
  misc_feature 1..20: note = Targeting Domain
  source 1..20: mol_type = other RNA
ttagtgatgcccagttgacc

SEQ ID NO: 1001 - RNA, 21 nt, synthetic construct
  misc_feature 1..21: note = Targeting Domain
  source 1..21: mol_type = other RNA
cttagtgatgcccagttgacc

SEQ ID NO: 1002 - RNA, 22 nt, synthetic construct
  misc_feature 1..22: note = Targeting Domain
  source 1..22: mol_type = other RNA
ccttagtgatgcccagttgacc

SEQ ID NO: 1003 - RNA, 23 nt, synthetic construct
  misc_feature 1..23: note = Targeting Domain
  source 1..23: mol_type = other RNA
accttagtgatgcccagttgacc

SEQ ID NO: 1004 - RNA, 24 nt, synthetic construct
  misc_feature 1..24: note = Targeting Domain
  source 1..24: mol_type = other RNA
gaccttagtgatgcccagttgacc

SEQ ID NO: 1005 - RNA, 18 nt, synthetic construct
  misc_feature 1..18: note = Targeting Domain
  source 1..18: mol_type = other RNA
gtgcctcctctgtgaccc

SEQ ID NO: 1006 - RNA, 19 nt, synthetic construct
  misc_feature 1..19: note = Targeting Domain
  source 1..19: mol_type = other RNA
ggtgcctcctctgtgaccc

SEQ ID NO: 1007 - RNA, 21 nt, synthetic construct
  misc_feature 1..21: note = Targeting Domain
  source 1..21: mol_type = other RNA
ggggtgcctcctctgtgaccc

SEQ ID NO: 1008 - RNA, 22 nt, synthetic construct
  misc_feature 1..22: note = Targeting Domain
  source 1..22: mol_type = other RNA
aggggtgcctcctctgtgaccc

SEQ ID NO: 1009 - RNA, 23 nt, synthetic construct
  misc_feature 1..23: note = Targeting Domain
  source 1..23: mol_type = other RNA
caggggtgcctcctctgtgaccc

SEQ ID NO: 1010 - RNA, 24 nt, synthetic construct
  misc_feature 1..24: note = Targeting Domain
  source 1..24: mol_type = other RNA
tcaggggtgcctcctctgtgaccc

SEQ ID NO: 1011 - RNA, 18 nt, synthetic construct
  misc_feature 1..18: note = Targeting Domain
  source 1..18: mol_type = other RNA
gcctcctctgtgaccccg

SEQ ID NO: 1012 - RNA, 19 nt, synthetic construct
  misc_feature 1..19: note = Targeting Domain
  source 1..19: mol_type = other RNA
tgcctcctctgtgaccccg

SEQ ID NO: 1013 - RNA, 20 nt, synthetic construct
  misc_feature 1..20: note = Targeting Domain
  source 1..20: mol_type = other RNA
gtgcctcctctgtgaccccg

SEQ ID NO: 1014 - RNA, 21 nt, synthetic construct
  misc_feature 1..21: note = Targeting Domain
  source 1..21: mol_type = other RNA
ggtgcctcctctgtgaccccg

SEQ ID NO: 1015 - RNA, 22 nt, synthetic construct
  misc_feature 1..22: note = Targeting Domain
  source 1..22: mol_type = other RNA
gggtgcctcctctgtgaccccg

SEQ ID NO: 1016 - RNA, 23 nt, synthetic construct
  misc_feature 1..23: note = Targeting Domain
  source 1..23: mol_type = other RNA
ggggtgcctcctctgtgaccccg

SEQ ID NO: 1017 - RNA, 24 nt, synthetic construct
  misc_feature 1..24: note = Targeting Domain
  source 1..24: mol_type = other RNA
aggggtgcctcctctgtgaccccg

SEQ ID NO: 1018 - RNA, 18 nt, synthetic construct
  misc_feature 1..18: note = Targeting Domain
  source 1..18: mol_type = other RNA
gctggcagacctgtcgtg

SEQ ID NO: 1019 - RNA, 19 nt, synthetic construct
  misc_feature 1..19: note = Targeting Domain
  source 1..19: mol_type = other RNA
agctggcagacctgtcgtg

SEQ ID NO: 1020 - RNA, 20 nt, synthetic construct
  misc_feature 1..20: note = Targeting Domain
  source 1..20: mol_type = other RNA
aagctggcagacctgtcgtg

SEQ ID NO: 1021 - RNA, 21 nt, synthetic construct
  misc_feature 1..21: note = Targeting Domain
  source 1..21: mol_type = other RNA
taagctggcagacctgtcgtg

SEQ ID NO: 1022 - RNA, 22 nt, synthetic construct
  misc_feature 1..22: note = Targeting Domain
  source 1..22: mol_type = other RNA
gtaagctggcagacctgtcgtg

SEQ ID NO: 1023 - RNA, 23 nt, synthetic construct
  misc_feature 1..23: note = Targeting Domain
  source 1..23: mol_type = other RNA
tgtaagctggcagacctgtcgtg

SEQ ID NO: 1024 - RNA, 24 nt, synthetic construct
  misc_feature 1..24: note = Targeting Domain
  source 1..24: mol_type = other RNA
atgtaagctggcagacctgtcgtg

SEQ ID NO: 1025 - RNA, 18 nt, synthetic construct
  misc_feature 1..18: note = Targeting Domain
  source 1..18: mol_type = other RNA
gagaggtcagccccattg

SEQ ID NO: 1026 - RNA, 19 nt, synthetic construct
  misc_feature 1..19: note = Targeting Domain
  source 1..19: mol_type = other RNA
ggagaggtcagccccattg

SEQ ID NO: 1027 - RNA, 20 nt, synthetic construct
  misc_feature 1..20: note = Targeting Domain
  source 1..20: mol_type = other RNA
cggagaggtcagccccattg

SEQ ID NO: 1028 - RNA, 21 nt, synthetic construct
  misc_feature 1..21: note = Targeting Domain
  source 1..21: mol_type = other RNA
ccggagaggtcagccccattg

SEQ ID NO: 1029 - RNA, 22 nt, synthetic construct
  misc_feature 1..22: note = Targeting Domain
  source 1..22: mol_type = other RNA
cccggagaggtcagccccattg

SEQ ID NO: 1030 - RNA, 23 nt, synthetic construct
  misc_feature 1..23: note = Targeting Domain
  source 1..23: mol_type = other RNA
ccccggagaggtcagccccattg

SEQ ID NO: 1031 - RNA, 24 nt, synthetic construct
  misc_feature 1..24: note = Targeting Domain
  source 1..24: mol_type = other RNA
accccggagaggtcagccccattg

SEQ ID NO: 1032 - RNA, 18 nt, synthetic construct
  misc_feature 1..18: note = Targeting Domain
  source 1..18: mol_type = other RNA
cagggtgatctcaccttg

SEQ ID NO: 1033 - RNA, 19 nt, synthetic construct
  misc_feature 1..19: note = Targeting Domain
  source 1..19: mol_type = other RNA
tcagggtgatctcaccttg

SEQ ID NO: 1034 - RNA, 20 nt, synthetic construct
  misc_feature 1..20: note = Targeting Domain
  source 1..20: mol_type = other RNA
gtcagggtgatctcaccttg

SEQ ID NO: 1035 - RNA, 21 nt, synthetic construct
  misc_feature 1..21: note = Targeting Domain
  source 1..21: mol_type = other RNA
cgtcagggtgatctcaccttg

SEQ ID NO: 1036 - RNA, 22 nt, synthetic construct
  misc_feature 1..22: note = Targeting Domain
  source 1..22: mol_type = other RNA
tcgtcagggtgatctcaccttg

SEQ ID NO: 1037 - RNA, 23 nt, synthetic construct
  misc_feature 1..23: note = Targeting Domain
  source 1..23: mol_type = other RNA
gtcgtcagggtgatctcaccttg

SEQ ID NO: 1038 - RNA, 24 nt, synthetic construct
  misc_feature 1..24: note = Targeting Domain
  source 1..24: mol_type = other RNA
ggtcgtcagggtgatctcaccttg

SEQ ID NO: 1039 - RNA, 18 nt, synthetic construct
  misc_feature 1..18: note = Targeting Domain
  source 1..18: mol_type = other RNA
gtcagggtgatctcacct

SEQ ID NO: 1040 - RNA, 19 nt, synthetic construct
  misc_feature 1..19: note = Targeting Domain
  source 1..19: mol_type = other RNA
cgtcagggtgatctcacct

SEQ ID NO: 1041 - RNA, 21 nt, synthetic construct
  misc_feature 1..21: note = Targeting Domain
  source 1..21: mol_type = other RNA
gtcgtcagggtgatctcacct

SEQ ID NO: 1042 - RNA, 22 nt, synthetic construct
  misc_feature 1..22: note = Targeting Domain
  source 1..22: mol_type = other RNA
ggtcgtcagggtgatctcacct

SEQ ID NO: 1043 - RNA, 23 nt, synthetic construct
  misc_feature 1..23: note = Targeting Domain
  source 1..23: mol_type = other RNA
aggtcgtcagggtgatctcacct

SEQ ID NO: 1044 - RNA, 24 nt, synthetic construct
  misc_feature 1..24: note = Targeting Domain
  source 1..24: mol_type = other RNA
aaggtcgtcagggtgatctcacct

SEQ ID NO: 1045 - RNA, 18 nt, synthetic construct
  misc_feature 1..18: note = Targeting Domain
  source 1..18: mol_type = other RNA
tctcaccttggagagctt

SEQ ID NO: 1046 - RNA, 19 nt, synthetic construct
  misc_feature 1..19: note = Targeting Domain
  source 1..19: mol_type = other RNA
atctcaccttggagagctt

SEQ ID NO: 1047 - RNA, 20 nt, synthetic construct
  misc_feature 1..20: note = Targeting Domain
  source 1..20: mol_type = other RNA
gatctcaccttggagagctt

SEQ ID NO: 1048 - RNA, 21 nt, synthetic construct
  misc_feature 1..21: note = Targeting Domain
  source 1..21: mol_type = other RNA
tgatctcaccttggagagctt

SEQ ID NO: 1049 - RNA, 22 nt, synthetic construct
  misc_feature 1..22: note = Targeting Domain
  source 1..22: mol_type = other RNA
gtgatctcaccttggagagctt

SEQ ID NO: 1050 - RNA, 23 nt, synthetic construct
  misc_feature 1..23: note = Targeting Domain
  source 1..23: mol_type = other RNA
ggtgatctcaccttggagagctt

SEQ ID NO: 1051 - RNA, 24 nt, synthetic construct
  misc_feature 1..24: note = Targeting Domain
  source 1..24: mol_type = other RNA
gggtgatctcaccttggagagctt

SEQ ID NO: 1052 - RNA, 18 nt, synthetic construct
  misc_feature 1..18: note = Targeting Domain
  source 1..18: mol_type = other RNA
cactaaggtcttcagcaa

SEQ ID NO: 1053 - RNA, 19 nt, synthetic construct
  misc_feature 1..19: note = Targeting Domain
  source 1..19: mol_type = other RNA
tcactaaggtcttcagcaa

SEQ ID NO: 1054 - RNA, 21 nt, synthetic construct
  misc_feature 1..21: note = Targeting Domain
  source 1..21: mol_type = other RNA
catcactaaggtcttcagcaa

SEQ ID NO: 1055 - RNA, 22 nt, synthetic construct
  misc_feature 1..22: note = Targeting Domain
  source 1..22: mol_type = other RNA
gcatcactaaggtcttcagcaa

SEQ ID NO: 1056 - RNA, 23 nt, synthetic construct
  misc_feature 1..23: note = Targeting Domain
  source 1..23: mol_type = other RNA
ggcatcactaaggtcttcagcaa

SEQ ID NO: 1057 - RNA, 24 nt, synthetic construct
  misc_feature 1..24: note = Targeting Domain
  source 1..24: mol_type = other RNA
gggcatcactaaggtcttcagcaa

SEQ ID NO: 1058 - RNA, 18 nt, synthetic construct
  misc_feature 1..18: note = Targeting Domain
  source 1..18: mol_type = other RNA
aagagcgtcctgggtcaa

SEQ ID NO: 1059 - RNA, 19 nt, synthetic construct
  misc_feature 1..19: note = Targeting Domain
  source 1..19: mol_type = other RNA
gaagagcgtcctgggtcaa

SEQ ID NO: 1060 - RNA, 20 nt, synthetic construct
  misc_feature 1..20: note = Targeting Domain
  source 1..20: mol_type = other RNA
tgaagagcgtcctgggtcaa

SEQ ID NO: 1061 - RNA, 21 nt, synthetic construct
  misc_feature 1..21: note = Targeting Domain
  source 1..21: mol_type = other RNA
ctgaagagcgtcctgggtcaa

SEQ ID NO: 1062 - RNA, 22 nt, synthetic construct
  misc_feature 1..22: note = Targeting Domain
  source 1..22: mol_type = other RNA
tctgaagagcgtcctgggtcaa

SEQ ID NO: 1063 - RNA, 23 nt, synthetic construct
  misc_feature 1..23: note = Targeting Domain
  source 1..23: mol_type = other RNA
atctgaagagcgtcctgggtcaa

SEQ ID NO: 1064 - RNA, 24 nt, synthetic construct
  misc_feature 1..24: note = Targeting Domain
  source 1..24: mol_type = other RNA
gatctgaagagcgtcctgggtcaa

SEQ ID NO: 1065 - RNA, 18 nt, synthetic construct
  misc_feature 1..18: note = Targeting Domain
  source 1..18: mol_type = other RNA
gacctctccggggtcaca

SEQ ID NO: 1066 - RNA, 19 nt, synthetic construct
  misc_feature 1..19: note = Targeting Domain
  source 1..19: mol_type = other RNA
tgacctctccggggtcaca

SEQ ID NO: 1067 - RNA, 20 nt, synthetic construct
  misc_feature 1..20: note = Targeting Domain
  source 1..20: mol_type = other RNA
ctgacctctccggggtcaca

SEQ ID NO: 1068 - RNA, 21 nt, synthetic construct
  misc_feature 1..21: note = Targeting Domain
  source 1..21: mol_type = other RNA
gctgacctctccggggtcaca

SEQ ID NO: 1069 - RNA, 22 nt, synthetic construct
  misc_feature 1..22: note = Targeting Domain
  source 1..22: mol_type = other RNA
ggctgacctctccggggtcaca

SEQ ID NO: 1070 - RNA, 23 nt, synthetic construct
  misc_feature 1..23: note = Targeting Domain
  source 1..23: mol_type = other RNA
gggctgacctctccggggtcaca

SEQ ID NO: 1071 - RNA, 24 nt, synthetic construct
  misc_feature 1..24: note = Targeting Domain
  source 1..24: mol_type = other RNA
ggggctgacctctccggggtcaca

SEQ ID NO: 1072 - RNA, 18 nt, synthetic construct
  misc_feature 1..18: note = Targeting Domain
  source 1..18: mol_type = other RNA
tcactaaggtcttcagca

SEQ ID NO: 1073 - RNA, 19 nt, synthetic construct
  misc_feature 1..19: note = Targeting Domain
  source 1..19: mol_type = other RNA
atcactaaggtcttcagca

SEQ ID NO: 1074 - RNA, 20 nt, synthetic construct
  misc_feature 1..20: note = Targeting Domain
  source 1..20: mol_type = other RNA
catcactaaggtcttcagca

SEQ ID NO: 1075 - RNA, 21 nt, synthetic construct
  misc_feature 1..21: note = Targeting Domain
  source 1..21: mol_type = other RNA
gcatcactaaggtcttcagca

SEQ ID NO: 1076 - RNA, 22 nt, synthetic construct
  misc_feature 1..22: note = Targeting Domain
  source 1..22: mol_type = other RNA
ggcatcactaaggtcttcagca

SEQ ID NO: 1077 - RNA, 23 nt, synthetic construct
  misc_feature 1..23: note = Targeting Domain
  source 1..23: mol_type = other RNA
gggcatcactaaggtcttcagca

SEQ ID NO: 1078 - RNA, 24 nt, synthetic construct
  misc_feature 1..24: note = Targeting Domain
  source 1..24: mol_type = other RNA
tgggcatcactaaggtcttcagca

SEQ ID NO: 1079 - RNA, 18 nt, synthetic construct
  misc_feature 1..18: note = Targeting Domain
  source 1..18: mol_type = other RNA
ctgacctctccggggtca

SEQ ID NO: 1080 - RNA, 19 nt, synthetic construct
  misc_feature 1..19: note = Targeting Domain
  source 1..19: mol_type = other RNA
gctgacctctccggggtca

SEQ ID NO: 1081 - RNA, 20 nt, synthetic construct
  misc_feature 1..20: note = Targeting Domain
  source 1..20: mol_type = other RNA
ggctgacctctccggggtca

SEQ ID NO: 1082 - RNA, 21 nt, synthetic construct
  misc_feature 1..21: note = Targeting Domain
  source 1..21: mol_type = other RNA
gggctgacctctccggggtca

SEQ ID NO: 1083 - RNA, 22 nt, synthetic construct
  misc_feature 1..22: note = Targeting Domain
  source 1..22: mol_type = other RNA
ggggctgacctctccggggtca

SEQ ID NO: 1084 - RNA, 23 nt, synthetic construct
  misc_feature 1..23: note = Targeting Domain
  source 1..23: mol_type = other RNA
tggggctgacctctccggggtca

SEQ ID NO: 1085 - RNA, 24 nt, synthetic construct
  misc_feature 1..24: note = Targeting Domain
  source 1..24: mol_type = other RNA
atggggctgacctctccggggtca

SEQ ID NO: 1086 - RNA, 18 nt, synthetic construct
  misc_feature 1..18: note = Targeting Domain
  source 1..18: mol_type = other RNA
tacccaaactgtccatta

SEQ ID NO: 1087 - RNA, 19 nt, synthetic construct
  misc_feature 1..19: note = Targeting Domain
  source 1..19: mol_type = other RNA
ttacccaaactgtccatta

SEQ ID NO: 1088 - RNA, 20 nt, synthetic construct
  misc_feature 1..20: note = Targeting Domain
  source 1..20: mol_type = other RNA
tttacccaaactgtccatta

SEQ ID NO: 1089 - RNA, 21 nt, synthetic construct
  misc_feature 1..21: note = Targeting Domain
  source 1..21: mol_type = other RNA
atttacccaaactgtccatta

SEQ ID NO: 1090 - RNA, 22 nt, synthetic construct
  misc_feature 1..22: note = Targeting Domain
  source 1..22: mol_type = other RNA
catttacccaaactgtccatta

SEQ ID NO: 1091 - RNA, 23 nt, synthetic construct
  misc_feature 1..23: note = Targeting Domain
  source 1..23: mol_type = other RNA
acatttacccaaactgtccatta

SEQ ID NO: 1092 - RNA, 24 nt, synthetic construct
  misc_feature 1..24: note = Targeting Domain
  source 1..24: mol_type = other RNA
tacatttacccaaactgtccatta

SEQ ID NO: 1093 - RNA, 18 nt, synthetic construct
  misc_feature 1..18: note = Targeting Domain
  source 1..18: mol_type = other RNA
acccaaactgtccattac

SEQ ID NO: 1094 - RNA, 19 nt, synthetic construct
  misc_feature 1..19: note = Targeting Domain
  source 1..19: mol_type = other RNA
tacccaaactgtccattac

SEQ ID NO: 1095 - RNA, 21 nt, synthetic construct
  misc_feature 1..21: note = Targeting Domain
  source 1..21: mol_type = other RNA
tttacccaaactgtccattac

SEQ ID NO: 1096 - RNA, 22 nt, synthetic construct
  misc_feature 1..22: note = Targeting Domain
  source 1..22: mol_type = other RNA
atttacccaaactgtccattac

SEQ ID NO: 1097 - RNA, 23 nt, synthetic construct
  misc_feature 1..23: note = Targeting Domain
  source 1..23: mol_type = other RNA
catttacccaaactgtccattac

SEQ ID NO: 1098 - RNA, 24 nt, synthetic construct
  misc_feature 1..24: note = Targeting Domain
  source 1..24: mol_type = other RNA
acatttacccaaactgtccattac

SEQ ID NO: 1099 - RNA, 18 nt, synthetic construct
  misc_feature 1..18: note = Targeting Domain
  source 1..18: mol_type = other RNA
gtcacagaggaggcaccc

SEQ ID NO: 1100 - RNA, 19 nt, synthetic construct
  misc_feature 1..19: note = Targeting Domain
  source 1..19: mol_type = other RNA
ggtcacagaggaggcaccc

SEQ ID NO: 1101 - RNA, 20 nt, synthetic construct
  misc_feature 1..20: note = Targeting Domain
  source 1..20: mol_type = other RNA
gggtcacagaggaggcaccc

SEQ ID NO: 1102 - RNA, 21 nt, synthetic construct
  misc_feature 1..21: note = Targeting Domain
  source 1..21: mol_type = other RNA
ggggtcacagaggaggcaccc

SEQ ID NO: 1103 - RNA, 22 nt, synthetic construct
  misc_feature 1..22: note = Targeting Domain
  source 1..22: mol_type = other RNA
cggggtcacagaggaggcaccc

SEQ ID NO: 1104 - RNA, 23 nt, synthetic construct
  misc_feature 1..23: note = Targeting Domain
  source 1..23: mol_type = other RNA
ccggggtcacagaggaggcaccc

SEQ ID NO: 1105 - RNA, 24 nt, synthetic construct
  misc_feature 1..24: note = Targeting Domain
  source 1..24: mol_type = other RNA
tccggggtcacagaggaggcaccc

SEQ ID NO: 1106 - RNA, 18 nt, synthetic construct
  misc_feature 1..18: note = Targeting Domain
  source 1..18: mol_type = other RNA
cccctgaagctctccaag

SEQ ID NO: 1107 - RNA, 19 nt, synthetic construct
  misc_feature 1..19: note = Targeting Domain
  source 1..19: mol_type = other RNA
acccctgaagctctccaag

SEQ ID NO: 1108 - RNA, 20 nt, synthetic construct
  misc_feature 1..20: note = Targeting Domain
  source 1..20: mol_type = other RNA
cacccctgaagctctccaag

SEQ ID NO: 1109 - RNA, 21 nt, synthetic construct
  misc_feature 1..21: note = Targeting Domain
  source 1..21: mol_type = other RNA
gcacccctgaagctctccaag

SEQ ID NO: 1110 - RNA, 22 nt, synthetic construct
  misc_feature 1..22: note = Targeting Domain
  source 1..22: mol_type = other RNA
ggcacccctgaagctctccaag

SEQ ID NO: 1111 - RNA, 23 nt, synthetic construct
  misc_feature 1..23: note = Targeting Domain
  source 1..23: mol_type = other RNA
aggcacccctgaagctctccaag

SEQ ID NO: 1112 - RNA, 24 nt, synthetic construct
  misc_feature 1..24: note = Targeting Domain
  source 1..24: mol_type = other RNA
gaggcacccctgaagctctccaag

SEQ ID NO: 1113 - RNA, 18 nt, synthetic construct
  misc_feature 1..18: note = Targeting Domain
  source 1..18: mol_type = other RNA
acctctccggggtcacag

SEQ ID NO: 1114 - RNA, 19 nt, synthetic construct
  misc_feature 1..19: note = Targeting Domain
  source 1..19: mol_type = other RNA
gacctctccggggtcacag

SEQ ID NO: 1115 - RNA, 21 nt, synthetic construct
  misc_feature 1..21: note = Targeting Domain
  source 1..21: mol_type = other RNA
ctgacctctccggggtcacag

SEQ ID NO: 1116 - RNA, 22 nt, synthetic construct
  misc_feature 1..22: note = Targeting Domain
  source 1..22: mol_type = other RNA
gctgacctctccggggtcacag

SEQ ID NO: 1117 - RNA, 23 nt, synthetic construct
  misc_feature 1..23: note = Targeting Domain
  source 1..23: mol_type = other RNA
ggctgacctctccggggtcacag

SEQ ID NO: 1118 - RNA, 24 nt, synthetic construct
  misc_feature 1..24: note = Targeting Domain
  source 1..24: mol_type = other RNA
gggctgacctctccggggtcacag

SEQ ID NO: 1119 - RNA, 18 nt, synthetic construct
  misc_feature 1..18: note = Targeting Domain
  source 1..18: mol_type = other RNA
actggaacctatgatctg

SEQ ID NO: 1120 - RNA, 19 nt, synthetic construct
  misc_feature 1..19: note = Targeting Domain
  source 1..19: mol_type = other RNA
tactggaacctatgatctg

SEQ ID NO: 1121 - RNA, 20 nt, synthetic construct
  misc_feature 1..20: note = Targeting Domain
  source 1..20: mol_type = other RNA
ttactggaacctatgatctg

SEQ ID NO: 1122 - RNA, 21 nt, synthetic construct
  misc_feature 1..21: note = Targeting Domain
  source 1..21: mol_type = other RNA
attactggaacctatgatctg

SEQ ID NO: 1123 - RNA, 22 nt, synthetic construct
  misc_feature 1..22: note = Targeting Domain
  source 1..22: mol_type = other RNA
cattactggaacctatgatctg

SEQ ID NO: 1124 - RNA, 23 nt, synthetic construct
  misc_feature 1..23: note = Targeting Domain
  source 1..23: mol_type = other RNA
ccattactggaacctatgatctg

SEQ ID NO: 1125 - RNA, 24 nt, synthetic construct
  misc_feature 1..24: note = Targeting Domain
  source 1..24: mol_type = other RNA
tccattactggaacctatgatctg

SEQ ID NO: 1126 - RNA, 18 nt, synthetic construct
  misc_feature 1..18: note = Targeting Domain
  source 1..18: mol_type = other RNA
attactggaacctatgat

SEQ ID NO: 1127 - RNA, 19 nt, synthetic construct
  misc_feature 1..19: note = Targeting Domain
  source 1..19: mol_type = other RNA
cattactggaacctatgat

SEQ ID NO: 1128 - RNA, 20 nt, synthetic construct
  misc_feature 1..20: note = Targeting Domain
  source 1..20: mol_type = other RNA
ccattactggaacctatgat

SEQ ID NO: 1129 - RNA, 21 nt, synthetic construct
  misc_feature 1..21: note = Targeting Domain
  source 1..21: mol_type = other RNA
tccattactggaacctatgat

SEQ ID NO: 1130 - RNA, 22 nt, synthetic construct
  misc_feature 1..22: note = Targeting Domain
  source 1..22: mol_type = other RNA
gtccattactggaacctatgat

SEQ ID NO: 1131 - RNA, 23 nt, synthetic construct
  misc_feature 1..23: note = Targeting Domain
  source 1..23: mol_type = other RNA
tgtccattactggaacctatgat

SEQ ID NO: 1132 - RNA, 24 nt, synthetic construct
  misc_feature 1..24: note = Targeting Domain
  source 1..24: mol_type = other RNA
ctgtccattactggaacctatgat

SEQ ID NO: 1133 - RNA, 18 nt, synthetic construct
  misc_feature 1..18: note = Targeting Domain
  source 1..18: mol_type = other RNA
gcaatggggctgacctct

SEQ ID NO: 1134 - RNA, 19 nt, synthetic construct
  misc_feature 1..19: note = Targeting Domain
  source 1..19: mol_type = other RNA
agcaatggggctgacctct

SEQ ID NO: 1135 - RNA, 20 nt, synthetic construct
  misc_feature 1..20: note = Targeting Domain
  source 1..20: mol_type = other RNA
cagcaatggggctgacctct

SEQ ID NO: 1136 - RNA, 21 nt, synthetic construct
  misc_feature 1..21: note = Targeting Domain
  source 1..21: mol_type = other RNA
tcagcaatggggctgacctct

SEQ ID NO: 1137 - RNA, 22 nt, synthetic construct
  misc_feature 1..22: note = Targeting Domain
  source 1..22: mol_type = other RNA
ttcagcaatggggctgacctct

SEQ ID NO: 1138 - RNA, 23 nt, synthetic construct
  misc_feature 1..23: note = Targeting Domain
  source 1..23: mol_type = other RNA
cttcagcaatggggctgacctct

SEQ ID NO: 1139 - RNA, 24 nt, synthetic construct
  misc_feature 1..24: note = Targeting Domain
  source 1..24: mol_type = other RNA
tcttcagcaatggggctgacctct

SEQ ID NO: 1140 - RNA, 20 nt, synthetic construct
  misc_feature 1..20: note = Targeting Domain
  source 1..20: mol_type = other RNA
gatcaacgattacgtggaga

SEQ ID NO: 1141 - RNA, 20 nt, synthetic construct
  misc_feature 1..20: note = Targeting Domain
  source 1..20: mol_type = other RNA
gaaacagatcaacgattacg

SEQ ID NO: 1142 - RNA, 20 nt, synthetic construct
  misc_feature 1..20: note = Targeting Domain
  source 1..20: mol_type = other RNA
gaggaacaggccattgccgg

SEQ ID NO: 1143 - RNA, 20 nt, synthetic construct
  misc_feature 1..20: note = Targeting Domain
  source 1..20: mol_type = other RNA
ggctgtagcgatgctcactg

SEQ ID NO: 1144 - RNA, 20 nt, synthetic construct
  misc_feature 1..20: note = Targeting Domain
  source 1..20: mol_type = other RNA
gagcctccggaatctccgtg

SEQ ID NO: 1145 - RNA, 20 nt, synthetic construct
  misc_feature 1..20: note = Targeting Domain
  source 1..20: mol_type = other RNA
ggtgtgccagctggcggtat

SEQ ID NO: 1146 - RNA, 20 nt, synthetic construct
  misc_feature 1..20: note = Targeting Domain
  source 1..20: mol_type = other RNA
ggggtgatcttgttgaaggt

SEQ ID NO: 1147 - RNA, 20 nt, synthetic construct
  misc_feature 1..20: note = Targeting Domain
  source 1..20: mol_type = other RNA
gaaggcgaactcagccaggt

SEQ ID NO: 1148 - RNA, 20 nt, synthetic construct
  misc_feature 1..20: note = Targeting Domain
  source 1..20: mol_type = other RNA
aggttgggtgatcctgatca

SEQ ID NO: 1149 - RNA, 20 nt, synthetic construct
  misc_feature 1..20: note = Targeting Domain
  source 1..20: mol_type = other RNA
actcacgatgaaatcctgga

SEQ ID NO: 1150 - RNA, 20 nt, synthetic construct
  misc_feature 1..20: note = Targeting Domain
  source 1..20: mol_type = other RNA
ccggaggctcagatccatga

SEQ ID NO: 1151 - RNA, 20 nt, synthetic construct
  misc_feature 1..20: note = Targeting Domain
  source 1..20: mol_type = other RNA
cagctggcggtataggctga

SEQ ID NO: 1152 - RNA, 20 nt, synthetic construct
  misc_feature 1..20: note = Targeting Domain
  source 1..20: mol_type = other RNA
caacaagatcacccccaacc

SEQ ID NO: 1153 - RNA, 20 nt, synthetic construct
  misc_feature 1..20: note = Targeting Domain
  source 1..20: mol_type = other RNA
tgagggtacggaggagttcc

SEQ ID NO: 1154 - RNA, 20 nt, synthetic construct
  misc_feature 1..20: note = Targeting Domain
  source 1..20: mol_type = other RNA
cttcagcctataccgccagc

SEQ ID NO: 1155 - RNA, 20 nt, synthetic construct
  misc_feature 1..20: note = Targeting Domain
  source 1..20: mol_type = other RNA
tgttggactggtgtgccagc

SEQ ID NO: 1156 - RNA, 20 nt, synthetic construct
  misc_feature 1..20: note = Targeting Domain
  source 1..20: mol_type = other RNA
tttcaacctcacggagattc

SEQ ID NO: 1157 - RNA, 20 nt, synthetic construct
  misc_feature 1..20: note = Targeting Domain
  source 1..20: mol_type = other RNA
caatggcctgttcctcagcg

SEQ ID NO: 1158 - RNA, 20 nt, synthetic construct
  misc_feature 1..20: note = Targeting Domain
  source 1..20: mol_type = other RNA
caatgccgtcttctgtctcg

SEQ ID NO: 1159 - RNA, 20 nt, synthetic construct
  misc_feature 1..20: note = Targeting Domain
  source 1..20: mol_type = other RNA
caacctcacggagattccgg

SEQ ID NO: 1160 - RNA, 20 nt, synthetic construct
  misc_feature 1..20: note = Targeting Domain
  source 1..20: mol_type = other RNA
ctagcttcaggccctcgctg

SEQ ID NO: 1161 - RNA, 20 nt, synthetic construct
  misc_feature 1..20: note = Targeting Domain
  source 1..20: mol_type = other RNA
atgccgtcttctgtctcgtg

SEQ ID NO: 1162 - RNA, 20 nt, synthetic construct
  misc_feature 1..20: note = Targeting Domain
  source 1..20: mol_type = other RNA
aggcgaactcagccaggttg

SEQ ID NO: 1163 - RNA, 20 nt, synthetic construct
  misc_feature 1..20: note = Targeting Domain
  source 1..20: mol_type = other RNA
ttcatcgtgagtgtcagcct

SEQ ID NO: 1164 - RNA, 20 nt, synthetic construct
  misc_feature 1..20: note = Targeting Domain
  source 1..20: mol_type = other RNA
tgggtgatcctgatcatggt

SEQ ID NO: 1165 - RNA, 20 nt, synthetic construct
  misc_feature 1..20: note = Targeting Domain
  source 1..20: mol_type = other RNA
aaggcgaactcagccaggtt

SEQ ID NO: 1166 - RNA, 17 nt, synthetic construct
  misc_feature 1..17: note = Targeting Domain
  source 1..17: mol_type = other RNA
gctctccctggggacca

SEQ ID NO: 1167 - RNA, 17 nt, synthetic construct
  misc_feature 1..17: note = Targeting Domain
  source 1..17: mol_type = other RNA
gtcagccttggtcccca

SEQ ID NO: 1168 - RNA, 17 nt, synthetic construct
  misc_feature 1..17: note = Targeting Domain
  source 1..17: mol_type = other RNA
gtggagaagggtactca

SEQ ID NO: 1169 - RNA, 17 nt, synthetic construct
  misc_feature 1..17: note = Targeting Domain
  source 1..17: mol_type = other RNA
gttcctggaagccttca

SEQ ID NO: 1170 - RNA, 17 nt, synthetic construct
  misc_feature 1..17: note = Targeting Domain
  source 1..17: mol_type = other RNA
gtcctgcaagacagaga

SEQ ID NO: 1171 - RNA, 17 nt, synthetic construct
  misc_feature 1..17: note = Targeting Domain
  source 1..17: mol_type = other RNA
ggcctgttcctcagcga

SEQ ID NO: 1172 - RNA, 17 nt, synthetic construct
  misc_feature 1..17: note = Targeting Domain
  source 1..17: mol_type = other RNA
gaggctcagatccatga

SEQ ID NO: 1173 - RNA, 17 nt, synthetic construct
  misc_feature 1..17: note = Targeting Domain
  source 1..17: mol_type = other RNA
gctgtctggctggttga

SEQ ID NO: 1174 - RNA, 17 nt, synthetic construct
  misc_feature 1..17: note = Targeting Domain
  source 1..17: mol_type = other RNA
gggggtgatcttgttga

SEQ ID NO: 1175 - RNA, 17 nt, synthetic construct
  misc_feature 1..17: note = Targeting Domain
  source 1..17: mol_type = other RNA
ggccctcgctgaggaac

SEQ ID NO: 1176 - RNA, 17 nt, synthetic construct
  misc_feature 1..17: note = Targeting Domain
  source 1..17: mol_type = other RNA
gctgtagcgatgctcac

SEQ ID NO: 1177 - RNA, 17 nt, synthetic construct
  misc_feature 1..17: note = Targeting Domain
  source 1..17: mol_type = other RNA
ggcaggcctgtgctgcc

SEQ ID NO: 1178 - RNA, 17 nt, synthetic construct
  misc_feature 1..17: note = Targeting Domain
  source 1..17: mol_type = other RNA
gatccatgaaggcttcc

SEQ ID NO: 1179 - RNA, 17 nt, synthetic construct
  misc_feature 1..17: note = Targeting Domain
  source 1..17: mol_type = other RNA
gggtacggaggagttcc

SEQ ID NO: 1180 - RNA, 17 nt, synthetic construct
  misc_feature 1..17: note = Targeting Domain
  source 1..17: mol_type = other RNA
ggcatcctcctgctggc

SEQ ID NO: 1181 - RNA, 17 nt, synthetic construct
  misc_feature 1..17: note = Targeting Domain
  source 1..17: mol_type = other RNA
ggagctggctgtctggc

SEQ ID NO: 1182 - RNA, 17 nt, synthetic construct
  misc_feature 1..17: note = Targeting Domain
  source 1..17: mol_type = other RNA
gtggggcatcctcctgc

SEQ ID NO: 1183 - RNA, 17 nt, synthetic construct
  misc_feature 1..17: note = Targeting Domain
  source 1..17: mol_type = other RNA
gaggaacaggccattgc

SEQ ID NO: 1184 - RNA, 17 nt, synthetic construct
  misc_feature 1..17: note = Targeting Domain
  source 1..17: mol_type = other RNA
gggatgtatctgtcttc

SEQ ID NO: 1185 - RNA, 17 nt, synthetic construct
  misc_feature 1..17: note = Targeting Domain
  source 1..17: mol_type = other RNA
gctggttgagggtacgg

SEQ ID NO: 1186 - RNA, 17 nt, synthetic construct
  misc_feature 1..17: note = Targeting Domain
  source 1..17: mol_type = other RNA
gaacaggccattgccgg

SEQ ID NO: 1187 - RNA, 17 nt, synthetic construct
  misc_feature 1..17: note = Targeting Domain
  source 1..17: mol_type = other RNA
gcaagacagagatgggg

SEQ ID NO: 1188 - RNA, 17 nt, synthetic construct
  misc_feature 1..17: note = Targeting Domain
  source 1..17: mol_type = other RNA
ggtgatcctgatcatgg

SEQ ID NO: 1189 - RNA, 17 nt, synthetic construct
  misc_feature 1..17: note = Targeting Domain
  source 1..17: mol_type = other RNA
gaactcagccaggttgg

SEQ ID NO: 1190 - RNA, 17 nt, synthetic construct
  misc_feature 1..17: note = Targeting Domain
  source 1..17: mol_type = other RNA
gcttcaggccctcgctg

SEQ ID NO: 1191 - RNA, 17 nt, synthetic construct
  misc_feature 1..17: note = Targeting Domain
  source 1..17: mol_type = other RNA
ggctgtctggctggttg

SEQ ID NO: 1192 - RNA, 17 nt, synthetic construct
  misc_feature 1..17: note = Targeting Domain
  source 1..17: mol_type = other RNA
gtgccagctggcggtat

SEQ ID NO: 1193 - RNA, 17 nt, synthetic construct
  misc_feature 1..17: note = Targeting Domain
  source 1..17: mol_type = other RNA
ggatgtatctgtcttct

SEQ ID NO: 1194 - RNA, 17 nt, synthetic construct
  misc_feature 1..17: note = Targeting Domain
  source 1..17: mol_type = other RNA
gccgtcttctgtctcgt

SEQ ID NO: 1195 - RNA, 17 nt, synthetic construct
  misc_feature 1..17: note = Targeting Domain
  source 1..17: mol_type = other RNA
gtgatcttgttgaaggt

SEQ ID NO: 1196 - RNA, 17 nt, synthetic construct
  misc_feature 1..17: note = Targeting Domain
  source 1..17: mol_type = other RNA
ggcgaactcagccaggt

SEQ ID NO: 1197 - RNA, 17 nt, synthetic construct
  misc_feature 1..17: note = Targeting Domain
  source 1..17: mol_type = other RNA
gtgatcctgatcatggt

SEQ ID NO: 1198 - RNA, 17 nt, synthetic construct
  misc_feature 1..17: note = Targeting Domain
  source 1..17: mol_type = other RNA
gaagatattggtgctgt

SEQ ID NO: 1199 - RNA, 17 nt, synthetic construct
  misc_feature 1..17: note = Targeting Domain
  source 1..17: mol_type = other RNA
gccttcactgtcaactt

SEQ ID NO: 1200 - RNA, 17 nt, synthetic construct
  misc_feature 1..17: note = Targeting Domain
  source 1..17: mol_type = other RNA
gcgaactcagccaggtt

SEQ ID NO: 1201 - RNA, 17 nt, synthetic construct
  misc_feature 1..17: note = Targeting Domain
  source 1..17: mol_type = other RNA
gctagtggataagtttt

SEQ ID NO: 1202 - RNA, 20 nt, synthetic construct
  misc_feature 1..20: note = Targeting Domain
  source 1..20: mol_type = other RNA
gtgaattacatcttctttaa

SEQ ID NO: 1203 - RNA, 20 nt, synthetic construct
  misc_feature 1..20: note = Targeting Domain
  source 1..20: mol_type = other RNA
gatcctcagccagggagaca

SEQ ID NO: 1204 - RNA, 20 nt, synthetic construct
  misc_feature 1..20: note = Targeting Domain
  source 1..20: mol_type = other RNA
gggcctgaatttcaacctca

SEQ ID NO: 1205 - RNA, 20 nt, synthetic construct
  misc_feature 1..20: note = Targeting Domain
  source 1..20: mol_type = other RNA
gaaaattgtggatttggtca

SEQ ID NO: 1206 - RNA, 20 nt, synthetic construct
  misc_feature 1..20: note = Targeting Domain
  source 1..20: mol_type = other RNA
ggagttcctggaagccttca

SEQ ID NO: 1207 - RNA, 20 nt, synthetic construct
  misc_feature 1..20: note = Targeting Domain
  source 1..20: mol_type = other RNA
gtccccgaagttgacagtga

SEQ ID NO: 1208 - RNA, 20 nt, synthetic construct
  misc_feature 1..20: note = Targeting Domain
  source 1..20: mol_type = other RNA
gttgggggtgatcttgttga

SEQ ID NO: 1209 - RNA, 20 nt, synthetic construct
  misc_feature 1..20: note = Targeting Domain
  source 1..20: mol_type = other RNA
ggatcctcagccagggagac

SEQ ID NO: 1210 - RNA, 20 nt, synthetic construct
  misc_feature 1..20: note = Targeting Domain
  source 1..20: mol_type = other RNA
gagtgtcagccttggtcccc

SEQ ID NO: 1211 - RNA, 20 nt, synthetic construct
  misc_feature 1..20: note = Targeting Domain
  source 1..20: mol_type = other RNA
ggctgaaggcgaactcagcc

SEQ ID NO: 1212 - RNA, 20 nt, synthetic construct
  misc_feature 1..20: note = Targeting Domain
  source 1..20: mol_type = other RNA
gctggcaggcctgtgctgcc

SEQ ID NO: 1213 - RNA, 20 nt, synthetic construct
  misc_feature 1..20: note = Targeting Domain
  source 1..20: mol_type = other RNA
ggttgaaattcaggccctcc

SEQ ID NO: 1214 - RNA, 20 nt, synthetic construct
  misc_feature 1..20: note = Targeting Domain
  source 1..20: mol_type = other RNA
ggcagcacaggcctgccagc

SEQ ID NO: 1215 - RNA, 20 nt, synthetic construct
  misc_feature 1..20: note = Targeting Domain
  source 1..20: mol_type = other RNA
ggccattgccggtggtcagc

SEQ ID NO: 1216 - RNA, 20 nt, synthetic construct
  misc_feature 1..20: note = Targeting Domain
  source 1..20: mol_type = other RNA
gctggagctggctgtctggc

SEQ ID NO: 1217 - RNA, 20 nt, synthetic construct
  misc_feature 1..20: note = Targeting Domain
  source 1..20: mol_type = other RNA
gctgaggaacaggccattgc

SEQ ID NO: 1218 - RNA, 20 nt, synthetic construct
  misc_feature 1..20: note = Targeting Domain
  source 1..20: mol_type = other RNA
gtcagctggagctggctgtc

SEQ ID NO: 1219 - RNA, 20 nt, synthetic construct
  misc_feature 1..20: note = Targeting Domain
  source 1..20: mol_type = other RNA
ggtgggatgtatctgtcttc

SEQ ID NO: 1220 - RNA, 20 nt, synthetic construct
  misc_feature 1..20: note = Targeting Domain
  source 1..20: mol_type = other RNA
gtcctgcaagacagagatgg

SEQ ID NO: 1221 - RNA, 20 nt, synthetic construct
  misc_feature 1..20: note = Targeting Domain
  source 1..20: mol_type = other RNA
ggcgaactcagccaggttgg

SEQ ID NO: 1222 - RNA, 20 nt, synthetic construct
  misc_feature 1..20: note = Targeting Domain
  source 1..20: mol_type = other RNA
gctagtggataagtttttgg

SEQ ID NO: 1223 - RNA, 20 nt, synthetic construct
  misc_feature 1..20: note = Targeting Domain
  source 1..20: mol_type = other RNA
ggtccctgtctccctggctg

SEQ ID NO: 1224 - RNA, 20 nt, synthetic construct
  misc_feature 1..20: note = Targeting Domain
  source 1..20: mol_type = other RNA
gggtactcaagggaaaattg

SEQ ID NO: 1225 - RNA, 20 nt, synthetic construct
  misc_feature 1..20: note = Targeting Domain
  source 1..20: mol_type = other RNA
gctggctgtctggctggttg

SEQ ID NO: 1226 - RNA, 20 nt, synthetic construct
  misc_feature 1..20: note = Targeting Domain
  source 1..20: mol_type = other RNA
gcctttgcaatgctctccct

SEQ ID NO: 1227 - RNA, 20 nt, synthetic construct
  misc_feature 1..20: note = Targeting Domain
  source 1..20: mol_type = other RNA
gtgggatgtatctgtcttct

SEQ ID NO: 1228 - RNA, 20 nt, synthetic construct
  misc_feature 1..20: note = Targeting Domain
  source 1..20: mol_type = other RNA
gtaatcgttgatctgtttct

SEQ ID NO: 1229 - RNA, 20 nt, synthetic construct
  misc_feature 1..20: note = Targeting Domain
  source 1..20: mol_type = other RNA
gaagaagatattggtgctgt

SEQ ID NO: 1230 - RNA, 20 nt, synthetic construct
  misc_feature 1..20: note = Targeting Domain
  source 1..20: mol_type = other RNA
gaagccttcactgtcaactt

SEQ ID NO: 1231 - RNA, 20 nt, synthetic construct
  misc_feature 1..20: note = Targeting Domain
  source 1..20: mol_type = other RNA
gatctgtttcttggcctctt

SEQ ID NO: 1232 - RNA, 20 nt, synthetic construct
  misc_feature 1..20: note = Targeting Domain
  source 1..20: mol_type = other RNA
gggtgatcttgttgaaggtt

SEQ ID NO: 1233 - RNA, 20 nt, synthetic construct
  misc_feature 1..20: note = Targeting Domain
  source 1..20: mol_type = other RNA
gaagctagtggataagtttt

SEQ ID NO: 1234 - RNA, 17 nt, synthetic construct
  misc_feature 1..17: note = Targeting Domain
  source 1..17: mol_type = other RNA
cagctgaccaccggcaa

SEQ ID NO: 1235 - RNA, 17 nt, synthetic construct
  misc_feature 1..17: note = Targeting Domain
  source 1..17: mol_type = other RNA
cagggagagcattgcaa

SEQ ID NO: 1236 - RNA, 17 nt, synthetic construct
  misc_feature 1..17: note = Targeting Domain
  source 1..17: mol_type = other RNA
tggagaagggtactcaa

SEQ ID NO: 1237 - RNA, 17 nt, synthetic construct
  misc_feature 1..17: note = Targeting Domain
  source 1..17: mol_type = other RNA
aacgattacgtggagaa

SEQ ID NO: 1238 - RNA, 17 nt, synthetic construct
  misc_feature 1..17: note = Targeting Domain
  source 1..17: mol_type = other RNA
aattacatcttctttaa

SEQ ID NO: 1239 - RNA, 17 nt, synthetic construct
  misc_feature 1..17: note = Targeting Domain
  source 1..17: mol_type = other RNA
cctcagccagggagaca

SEQ ID NO: 1240 - RNA, 17 nt, synthetic construct
  misc_feature 1..17: note = Targeting Domain
  source 1..17: mol_type = other RNA
ctggctgaggatcccca

SEQ ID NO: 1241 - RNA, 17 nt, synthetic construct
  misc_feature 1..17: note = Targeting Domain
  source 1..17: mol_type = other RNA
ctggggatcctcagcca

SEQ ID NO: 1242 - RNA, 17 nt, synthetic construct
  misc_feature 1..17: note = Targeting Domain
  source 1..17: mol_type = other RNA
ttgggtgatcctgatca

SEQ ID NO: 1243 - RNA, 17 nt, synthetic construct
  misc_feature 1..17: note = Targeting Domain
  source 1..17: mol_type = other RNA
cctgaatttcaacctca

SEQ ID NO: 1244 - RNA, 17 nt, synthetic construct
  misc_feature 1..17: note = Targeting Domain
  source 1..17: mol_type = other RNA
aattgtggatttggtca

SEQ ID NO: 1245 - RNA, 17 nt, synthetic construct
  misc_feature 1..17: note = Targeting Domain
  source 1..17: mol_type = other RNA
ccccacgagacagaaga

SEQ ID NO: 1246 - RNA, 17 nt, synthetic construct
  misc_feature 1..17: note = Targeting Domain
  source 1..17: mol_type = other RNA
caacgattacgtggaga

SEQ ID NO: 1247 - RNA, 17 nt, synthetic construct
  misc_feature 1..17: note = Targeting Domain
  source 1..17: mol_type = other RNA
cacgatgaaatcctgga

SEQ ID NO: 1248 - RNA, 17 nt, synthetic construct
  misc_feature 1..17: note = Targeting Domain
  source 1..17: mol_type = other RNA
ctggcggtataggctga

SEQ ID NO: 1249 - RNA, 17 nt, synthetic construct
  misc_feature 1..17: note = Targeting Domain
  source 1..17: mol_type = other RNA
cccgaagttgacagtga

SEQ ID NO: 1250 - RNA, 17 nt, synthetic construct
  misc_feature 1..17: note = Targeting Domain
  source 1..17: mol_type = other RNA
catcttctttaaaggta

SEQ ID NO: 1251 - RNA, 17 nt, synthetic construct
  misc_feature 1..17: note = Targeting Domain
  source 1..17: mol_type = other RNA
ctggctggttgagggta

SEQ ID NO: 1252 - RNA, 17 nt, synthetic construct
  misc_feature 1..17: note = Targeting Domain
  source 1..17: mol_type = other RNA
cagctccagctgaccac

SEQ ID NO: 1253 - RNA, 17 nt, synthetic construct
  misc_feature 1..17: note = Targeting Domain
  source 1..17: mol_type = other RNA
cagggaccaggcagcac

SEQ ID NO: 1254 - RNA, 17 nt, synthetic construct
  misc_feature 1..17: note = Targeting Domain
  source 1..17: mol_type = other RNA
tcctcagccagggagac

SEQ ID NO: 1255 - RNA, 17 nt, synthetic construct
  misc_feature 1..17: note = Targeting Domain
  source 1..17: mol_type = other RNA
tattggtgctgttggac

SEQ ID NO: 1256 - RNA, 17 nt, synthetic construct
  misc_feature 1..17: note = Targeting Domain
  source 1..17: mol_type = other RNA
caagatcacccccaacc

SEQ ID NO: 1257 - RNA, 17 nt, synthetic construct
  misc_feature 1..17: note = Targeting Domain
  source 1..17: mol_type = other RNA
ccagggagacagggacc

SEQ ID NO: 1258 - RNA, 17 nt, synthetic construct
  misc_feature 1..17: note = Targeting Domain
  source 1..17: mol_type = other RNA
cctggctgaggatcccc

SEQ ID NO: 1259 - RNA, 17 nt, synthetic construct
  misc_feature 1..17: note = Targeting Domain
  source 1..17: mol_type = other RNA
tgtcagccttggtcccc

SEQ ID NO: 1260 - RNA, 17 nt, synthetic construct
  misc_feature 1..17: note = Targeting Domain
  source 1..17: mol_type = other RNA
tctgggcagcatctccc

SEQ ID NO: 1261 - RNA, 17 nt, synthetic construct
  misc_feature 1..17: note = Targeting Domain
  source 1..17: mol_type = other RNA
ctttgcaatgctctccc

SEQ ID NO: 1262 - RNA, 17 nt, synthetic construct
  misc_feature 1..17: note = Targeting Domain
  source 1..17: mol_type = other RNA
cctggtccctgtctccc

SEQ ID NO: 1263 - RNA, 17 nt, synthetic construct
  misc_feature 1..17: note = Targeting Domain
  source 1..17: mol_type = other RNA
tgaaggcgaactcagcc

SEQ ID NO: 1264 - RNA, 17 nt, synthetic construct
  misc_feature 1..17: note = Targeting Domain
  source 1..17: mol_type = other RNA
cctggggatcctcagcc

SEQ ID NO: 1265 - RNA, 17 nt, synthetic construct
  misc_feature 1..17: note = Targeting Domain
  source 1..17: mol_type = other RNA
acagagatgggggggcc

SEQ ID NO: 1266 - RNA, 17 nt, synthetic construct
  misc_feature 1..17: note = Targeting Domain
  source 1..17: mol_type = other RNA
cactcacgatgaaatcc

SEQ ID NO: 1267 - RNA, 17 nt, synthetic construct
  misc_feature 1..17: note = Targeting Domain
  source 1..17: mol_type = other RNA
tgaaattcaggccctcc

SEQ ID NO: 1268 - RNA, 17 nt, synthetic construct
  misc_feature 1..17: note = Targeting Domain
  source 1..17: mol_type = other RNA
cagcctataccgccagc

SEQ ID NO: 1269 - RNA, 17 nt, synthetic construct
  misc_feature 1..17: note = Targeting Domain
  source 1..17: mol_type = other RNA
agcacaggcctgccagc

SEQ ID NO: 1270 - RNA, 17 nt, synthetic construct
  misc_feature 1..17: note = Targeting Domain
  source 1..17: mol_type = other RNA
tggactggtgtgccagc

SEQ ID NO: 1271 - RNA, 17 nt, synthetic construct
  misc_feature 1..17: note = Targeting Domain
  source 1..17: mol_type = other RNA
cattgccggtggtcagc

SEQ ID NO: 1272 - RNA, 17 nt, synthetic construct
  misc_feature 1..17: note = Targeting Domain
  source 1..17: mol_type = other RNA
cggtggtcagctggagc

SEQ ID NO: 1273 - RNA, 17 nt, synthetic construct
  misc_feature 1..17: note = Targeting Domain
  source 1..17: mol_type = other RNA
ccccatctctgtcttgc

SEQ ID NO: 1274 - RNA, 17 nt, synthetic construct
  misc_feature 1..17: note = Targeting Domain
  source 1..17: mol_type = other RNA
tacatcccaccatgatc

SEQ ID NO: 1275 - RNA, 17 nt, synthetic construct
  misc_feature 1..17: note = Targeting Domain
  source 1..17: mol_type = other RNA
tcatggatctgagcctc

SEQ ID NO: 1276 - RNA, 17 nt, synthetic construct
  misc_feature 1..17: note = Targeting Domain
  source 1..17: mol_type = other RNA
agacacagtttttgctc

SEQ ID NO: 1277 - RNA, 17 nt, synthetic construct
  misc_feature 1..17: note = Targeting Domain
  source 1..17: mol_type = other RNA
agctggagctggctgtc

SEQ ID NO: 1278 - RNA, 17 nt, synthetic construct
  misc_feature 1..17: note = Targeting Domain
  source 1..17: mol_type = other RNA
ccgtgaggttgaaattc

SEQ ID NO: 1279 - RNA, 17 nt, synthetic construct
  misc_feature 1..17: note = Targeting Domain
  source 1..17: mol_type = other RNA
caacctcacggagattc

SEQ ID NO: 1280 - RNA, 17 nt, synthetic construct
  misc_feature 1..17: note = Targeting Domain
  source 1..17: mol_type = other RNA
ccttcactgtcaacttc

SEQ ID NO: 1281 - RNA, 17 nt, synthetic construct
  misc_feature 1..17: note = Targeting Domain
  source 1..17: mol_type = other RNA
acttatccactagcttc

SEQ ID NO: 1282 - RNA, 17 nt, synthetic construct
  misc_feature 1..17: note = Targeting Domain
  source 1..17: mol_type = other RNA
cttcggggacaccgaag

SEQ ID NO: 1283 - RNA, 17 nt, synthetic construct
  misc_feature 1..17: note = Targeting Domain
  source 1..17: mol_type = other RNA
cagtgaaggcttctgag

SEQ ID NO: 1284 - RNA, 17 nt, synthetic construct
  misc_feature 1..17: note = Targeting Domain
  source 1..17: mol_type = other RNA
cgagggcctgaagctag

SEQ ID NO: 1285 - RNA, 17 nt, synthetic construct
  misc_feature 1..17: note = Targeting Domain
  source 1..17: mol_type = other RNA
acagatcaacgattacg

SEQ ID NO: 1286 - RNA, 17 nt, synthetic construct
  misc_feature 1..17: note = Targeting Domain
  source 1..17: mol_type = other RNA
tggcctgttcctcagcg

SEQ ID NO: 1287 - RNA, 17 nt, synthetic construct
  misc_feature 1..17: note = Targeting Domain
  source 1..17: mol_type = other RNA
tgccgtcttctgtctcg

SEQ ID NO: 1288 - RNA, 17 nt, synthetic construct
  misc_feature 1..17: note = Targeting Domain
  source 1..17: mol_type = other RNA
cttcactgtcaacttcg

SEQ ID NO: 1289 - RNA, 17 nt, synthetic construct
  misc_feature 1..17: note = Targeting Domain
  source 1..17: mol_type = other RNA
acaggcctgccagcagg

SEQ ID NO: 1290 - RNA, 17 nt, synthetic construct
  misc_feature 1..17: note = Targeting Domain
  source 1..17: mol_type = other RNA
cctcacggagattccgg

SEQ ID NO: 1291 - RNA, 17 nt, synthetic construct
  misc_feature 1..17: note = Targeting Domain
  source 1..17: mol_type = other RNA
tgcaagacagagatggg

SEQ ID NO: 1292 - RNA, 17 nt, synthetic construct
  misc_feature 1..17: note = Targeting Domain
  source 1..17: mol_type = other RNA
ctgcaagacagagatgg

SEQ ID NO: 1293 - RNA, 17 nt, synthetic construct
  misc_feature 1..17: note = Targeting Domain
  source 1..17: mol_type = other RNA
tcacgatgaaatcctgg

SEQ ID NO: 1294 - RNA, 17 nt, synthetic construct
  misc_feature 1..17: note = Targeting Domain
  source 1..17: mol_type = other RNA
actggtgtgccagctgg

SEQ ID NO: 1295 - RNA, 17 nt, synthetic construct
  misc_feature 1..17: note = Targeting Domain
  source 1..17: mol_type = other RNA
agtggataagtttttgg

SEQ ID NO: 1296 - RNA, 17 nt, synthetic construct
  misc_feature 1..17: note = Targeting Domain
  source 1..17: mol_type = other RNA
cctgcaagacagagatg

SEQ ID NO: 1297 - RNA, 17 nt, synthetic construct
  misc_feature 1..17: note = Targeting Domain
  source 1..17: mol_type = other RNA
tgtagcgatgctcactg

SEQ ID NO: 1298 - RNA, 17 nt, synthetic construct
  misc_feature 1..17: note = Targeting Domain
  source 1..17: mol_type = other RNA
tgggcagcatctccctg

SEQ ID NO: 1299 - RNA, 17 nt, synthetic construct
  misc_feature 1..17: note = Targeting Domain
  source 1..17: mol_type = other RNA
ttgcaatgctctccctg

SEQ ID NO: 1300 - RNA, 17 nt, synthetic construct
  misc_feature 1..17: note = Targeting Domain
  source 1..17: mol_type = other RNA
ccctgtctccctggctg

SEQ ID NO: 1301 - RNA, 17 nt, synthetic construct
  misc_feature 1..17: note = Targeting Domain
  source 1..17: mol_type = other RNA
cctccggaatctccgtg

SEQ ID NO: 1302 - RNA, 17 nt, synthetic construct
  misc_feature 1..17: note = Targeting Domain
  source 1..17: mol_type = other RNA
ccgtcttctgtctcgtg

SEQ ID NO: 1303 - RNA, 17 nt, synthetic construct
  misc_feature 1..17: note = Targeting Domain
  source 1..17: mol_type = other RNA
tactcaagggaaaattg

SEQ ID NO: 1304 - RNA, 17 nt, synthetic construct
  misc_feature 1..17: note = Targeting Domain
  source 1..17: mol_type = other RNA
cgaactcagccaggttg

SEQ ID NO: 1305 - RNA, 17 nt, synthetic construct
  misc_feature 1..17: note = Targeting Domain
  source 1..17: mol_type = other RNA
tcctgcaagacagagat

SEQ ID NO: 1306 - RNA, 17 nt, synthetic construct
  misc_feature 1..17: note = Targeting Domain
  source 1..17: mol_type = other RNA
tggggagaagaagatat

SEQ ID NO: 1307 - RNA, 17 nt, synthetic construct
  misc_feature 1..17: note = Targeting Domain
  source 1..17: mol_type = other RNA
ctgtagcgatgctcact

SEQ ID NO: 1308 - RNA, 17 nt, synthetic construct
  misc_feature 1..17: note = Targeting Domain
  source 1..17: mol_type = other RNA
ctgggcagcatctccct

SEQ ID NO: 1309 - RNA, 17 nt, synthetic construct
  misc_feature 1..17: note = Targeting Domain
  source 1..17: mol_type = other RNA
tttgcaatgctctccct

SEQ ID NO: 1310 - RNA, 17 nt, synthetic construct
  misc_feature 1..17: note = Targeting Domain
  source 1..17: mol_type = other RNA
atcgtgagtgtcagcct

SEQ ID NO: 1311 - RNA, 17 nt, synthetic construct
  misc_feature 1..17: note = Targeting Domain
  source 1..17: mol_type = other RNA
atcgttgatctgtttct

SEQ ID NO: 1312 - RNA, 17 nt, synthetic construct
  misc_feature 1..17: note = Targeting Domain
  source 1..17: mol_type = other RNA
agggaaaattgtggatt

SEQ ID NO: 1313 - RNA, 17 nt, synthetic construct
  misc_feature 1..17: note = Targeting Domain
  source 1..17: mol_type = other RNA
ctgtttcttggcctctt

SEQ ID NO: 1314 - RNA, 17 nt, synthetic construct
  misc_feature 1..17: note = Targeting Domain
  source 1..17: mol_type = other RNA
tgatcttgttgaaggtt

SEQ ID NO: 1315 - RNA, 20 nt, synthetic construct
  misc_feature 1..20: note = Targeting Domain
  source 1..20: mol_type = other RNA
ctccagctgaccaccggcaa

SEQ ID NO: 1316 - RNA, 20 nt, synthetic construct
  misc_feature 1..20: note = Targeting Domain
  source 1..20: mol_type = other RNA
ccccagggagagcattgcaa

SEQ ID NO: 1317 - RNA, 20 nt, synthetic construct
  misc_feature 1..20: note = Targeting Domain
  source 1..20: mol_type = other RNA
acgtggagaagggtactcaa

SEQ ID NO: 1318 - RNA, 20 nt, synthetic construct
  misc_feature 1..20: note = Targeting Domain
  source 1..20: mol_type = other RNA
atcaacgattacgtggagaa

SEQ ID NO: 1319 - RNA, 20 nt, synthetic construct
  misc_feature 1..20: note = Targeting Domain
  source 1..20: mol_type = other RNA
aatgctctccctggggacca

SEQ ID NO: 1320 - RNA, 20 nt, synthetic construct
  misc_feature 1..20: note = Targeting Domain
  source 1..20: mol_type = other RNA
tccctggctgaggatcccca

SEQ ID NO: 1321 - RNA, 20 nt, synthetic construct
  misc_feature 1..20: note = Targeting Domain
  source 1..20: mol_type = other RNA
agtgtcagccttggtcccca

SEQ ID NO: 1322 - RNA, 20 nt, synthetic construct
  misc_feature 1..20: note = Targeting Domain
  source 1..20: mol_type = other RNA
tccctggggatcctcagcca

SEQ ID NO: 1323 - RNA, 20 nt, synthetic construct
  misc_feature 1..20: note = Targeting Domain
  source 1..20: mol_type = other RNA
tacgtggagaagggtactca

SEQ ID NO: 1324 - RNA, 20 nt, synthetic construct
  misc_feature 1..20: note = Targeting Domain
  source 1..20: mol_type = other RNA
atgccccacgagacagaaga

SEQ ID NO: 1325 - RNA, 20 nt, synthetic construct
  misc_feature 1..20: note = Targeting Domain
  source 1..20: mol_type = other RNA
attgtcctgcaagacagaga

SEQ ID NO: 1326 - RNA, 20 nt, synthetic construct
  misc_feature 1..20: note = Targeting Domain
  source 1..20: mol_type = other RNA
aatggcctgttcctcagcga

SEQ ID NO: 1327 - RNA, 20 nt, synthetic construct
  misc_feature 1..20: note = Targeting Domain
  source 1..20: mol_type = other RNA
ctggctgtctggctggttga

SEQ ID NO: 1328 - RNA, 20 nt, synthetic construct
  misc_feature 1..20: note = Targeting Domain
  source 1..20: mol_type = other RNA
ttacatcttctttaaaggta

SEQ ID NO: 1329 - RNA, 20 nt, synthetic construct
  misc_feature 1..20: note = Targeting Domain
  source 1..20: mol_type = other RNA
tgtctggctggttgagggta

SEQ ID NO: 1330 - RNA, 20 nt, synthetic construct
  misc_feature 1..20: note = Targeting Domain
  source 1..20: mol_type = other RNA
tcaggccctcgctgaggaac

SEQ ID NO: 1331 - RNA, 20 nt, synthetic construct
  misc_feature 1..20: note = Targeting Domain
  source 1..20: mol_type = other RNA
agccagctccagctgaccac

SEQ ID NO: 1332 - RNA, 20 nt, synthetic construct
  misc_feature 1..20: note = Targeting Domain
  source 1..20: mol_type = other RNA
agacagggaccaggcagcac

SEQ ID NO: 1333 - RNA, 20 nt, synthetic construct
  misc_feature 1..20: note = Targeting Domain
  source 1..20: mol_type = other RNA
aaggctgtagcgatgctcac

SEQ ID NO: 1334 - RNA, 20 nt, synthetic construct
  misc_feature 1..20: note = Targeting Domain
  source 1..20: mol_type = other RNA
agatattggtgctgttggac

SEQ ID NO: 1335 - RNA, 20 nt, synthetic construct
  misc_feature 1..20: note = Targeting Domain
  source 1..20: mol_type = other RNA
cagccagggagacagggacc

SEQ ID NO: 1336 - RNA, 20 nt, synthetic construct
  misc_feature 1..20: note = Targeting Domain
  source 1..20: mol_type = other RNA
ctccctggctgaggatcccc

SEQ ID NO: 1337 - RNA, 20 nt, synthetic construct
  misc_feature 1..20: note = Targeting Domain
  source 1..20: mol_type = other RNA
tcttctgggcagcatctccc

SEQ ID NO: 1338 - RNA, 20 nt, synthetic construct
  misc_feature 1..20: note = Targeting Domain
  source 1..20: mol_type = other RNA
agcctttgcaatgctctccc

SEQ ID NO: 1339 - RNA, 20 nt, synthetic construct
  misc_feature 1..20: note = Targeting Domain
  source 1..20: mol_type = other RNA
ctgcctggtccctgtctccc

SEQ ID NO: 1340 - RNA, 20 nt, synthetic construct
  misc_feature 1..20: note = Targeting Domain
  source 1..20: mol_type = other RNA
ctccctggggatcctcagcc

SEQ ID NO: 1341 - RNA, 20 nt, synthetic construct
  misc_feature 1..20: note = Targeting Domain
  source 1..20: mol_type = other RNA
aagacagagatgggggggcc

SEQ ID NO: 1342 - RNA, 20 nt, synthetic construct
  misc_feature 1..20: note = Targeting Domain
  source 1..20: mol_type = other RNA
tgacactcacgatgaaatcc

SEQ ID NO: 1343 - RNA, 20 nt, synthetic construct
  misc_feature 1..20: note = Targeting Domain
  source 1..20: mol_type = other RNA
tcagatccatgaaggcttcc

SEQ ID NO: 1344 - RNA, 20 nt, synthetic construct
  misc_feature 1..20: note = Targeting Domain
  source 1..20: mol_type = other RNA
tgccggtggtcagctggagc

SEQ ID NO: 1345 - RNA, 20 nt, synthetic construct
  misc_feature 1..20: note = Targeting Domain
  source 1..20: mol_type = other RNA
tggggcatcctcctgctggc

SEQ ID NO: 1346 - RNA, 20 nt, synthetic construct
  misc_feature 1..20: note = Targeting Domain
  source 1..20: mol_type = other RNA
ctcgtggggcatcctcctgc

SEQ ID NO: 1347 - RNA, 20 nt, synthetic construct
  misc_feature 1..20: note = Targeting Domain
  source 1..20: mol_type = other RNA
cccccccatctctgtcttgc

SEQ ID NO: 1348 - RNA, 20 nt, synthetic construct
  misc_feature 1..20: note = Targeting Domain
  source 1..20: mol_type = other RNA
agatacatcccaccatgatc

SEQ ID NO: 1349 - RNA, 20 nt, synthetic construct
  misc_feature 1..20: note = Targeting Domain
  source 1..20: mol_type = other RNA
ccttcatggatctgagcctc

SEQ ID NO: 1350 - RNA, 20 nt, synthetic construct
  misc_feature 1..20: note = Targeting Domain
  source 1..20: mol_type = other RNA
cagagacacagtttttgctc

SEQ ID NO: 1351 - RNA, 20 nt, synthetic construct
  misc_feature 1..20: note = Targeting Domain
  source 1..20: mol_type = other RNA
tctccgtgaggttgaaattc

SEQ ID NO: 1352 - RNA, 20 nt, synthetic construct
  misc_feature 1..20: note = Targeting Domain
  source 1..20: mol_type = other RNA
aagccttcactgtcaacttc

SEQ ID NO: 1353 - RNA, 20 nt, synthetic construct
  misc_feature 1..20: note = Targeting Domain
  source 1..20: mol_type = other RNA
aaaacttatccactagcttc

SEQ ID NO: 1354 - RNA, 20 nt, synthetic construct
  misc_feature 1..20: note = Targeting Domain
  source 1..20: mol_type = other RNA
caacttcggggacaccgaag

SEQ ID NO: 1355 - RNA, 20 nt, synthetic construct
  misc_feature 1..20: note = Targeting Domain
  source 1..20: mol_type = other RNA
tgacagtgaaggcttctgag

SEQ ID NO: 1356 - RNA, 20 nt, synthetic construct
  misc_feature 1..20: note = Targeting Domain
  source 1..20: mol_type = other RNA
cagcgagggcctgaagctag

SEQ ID NO: 1357 - RNA, 20 nt, synthetic construct
  misc_feature 1..20: note = Targeting Domain
  source 1..20: mol_type = other RNA
agccttcactgtcaacttcg

SEQ ID NO: 1358 - RNA, 20 nt, synthetic construct
  misc_feature 1..20: note = Targeting Domain
  source 1..20: mol_type = other RNA
agcacaggcctgccagcagg

SEQ ID NO: 1359 - RNA, 20 nt, synthetic construct
  misc_feature 1..20: note = Targeting Domain
  source 1..20: mol_type = other RNA
ctggctggttgagggtacgg

SEQ ID NO: 1360 - RNA, 20 nt, synthetic construct
  misc_feature 1..20: note = Targeting Domain
  source 1..20: mol_type = other RNA
cctgcaagacagagatgggg

SEQ ID NO: 1361 - RNA, 20 nt, synthetic construct
  misc_feature 1..20: note = Targeting Domain
  source 1..20: mol_type = other RNA
tcctgcaagacagagatggg

SEQ ID NO: 1362 - RNA, 20 nt, synthetic construct
  misc_feature 1..20: note = Targeting Domain
  source 1..20: mol_type = other RNA
ttgggtgatcctgatcatgg

SEQ ID NO: 1363 - RNA, 20 nt, synthetic construct
  misc_feature 1..20: note = Targeting Domain
  source 1..20: mol_type = other RNA
cactcacgatgaaatcctgg

SEQ ID NO: 1364 - RNA, 20 nt, synthetic construct
  misc_feature 1..20: note = Targeting Domain
  source 1..20: mol_type = other RNA
tggactggtgtgccagctgg

SEQ ID NO: 1365 - RNA, 20 nt, synthetic construct
  misc_feature 1..20: note = Targeting Domain
  source 1..20: mol_type = other RNA
tgtcctgcaagacagagatg

SEQ ID NO: 1366 - RNA, 20 nt, synthetic construct
  misc_feature 1..20: note = Targeting Domain
  source 1..20: mol_type = other RNA
ttctgggcagcatctccctg

SEQ ID NO: 1367 - RNA, 20 nt, synthetic construct
  misc_feature 1..20: note = Targeting Domain
  source 1..20: mol_type = other RNA
cctttgcaatgctctccctg

SEQ ID NO: 1368 - RNA, 20 nt, synthetic construct
  misc_feature 1..20: note = Targeting Domain
  source 1..20: mol_type = other RNA
ttgtcctgcaagacagagat

SEQ ID NO: 1369 - RNA, 20 nt, synthetic construct
  misc_feature 1..20: note = Targeting Domain
  source 1..20: mol_type = other RNA
cactggggagaagaagatat

SEQ ID NO: 1370 - RNA, 20 nt, synthetic construct
  misc_feature 1..20: note = Targeting Domain
  source 1..20: mol_type = other RNA
aggctgtagcgatgctcact

SEQ ID NO: 1371 - RNA, 20 nt, synthetic construct
  misc_feature 1..20: note = Targeting Domain
  source 1..20: mol_type = other RNA
cttctgggcagcatctccct

SEQ ID NO: 1372 - RNA, 20 nt, synthetic construct
  misc_feature 1..20: note = Targeting Domain
  source 1..20: mol_type = other RNA
aatgccgtcttctgtctcgt

SEQ ID NO: 1373 - RNA, 20 nt, synthetic construct
  misc_feature 1..20: note = Targeting Domain
  source 1..20: mol_type = other RNA
tcaagggaaaattgtggatt

SEQ ID NO: 1374 - RNA, 21 nt, synthetic construct
  misc_feature 1..21: note = Targeting Domain
  source 1..21: mol_type = other RNA
gaccaaatccacaattttccc

SEQ ID NO: 1375 - RNA, 21 nt, synthetic construct
  misc_feature 1..21: note = Targeting Domain
  source 1..21: mol_type = other RNA
gaggttgaaattcaggccctc

SEQ ID NO: 1376 - RNA, 23 nt, synthetic construct
  misc_feature 1..23: note = Targeting Domain
  source 1..23: mol_type = other RNA
gtgaggttgaaattcaggccctc

SEQ ID NO: 1377 - RNA, 21 nt, synthetic construct
  misc_feature 1..21: note = Targeting Domain
  source 1..21: mol_type = other RNA
gccttcatggatctgagcctc

SEQ ID NO: 1378 - RNA, 24 nt, synthetic construct
  misc_feature 1..24: note = Targeting Domain
  source 1..24: mol_type = other RNA
gaagccttcatggatctgagcctc

SEQ ID NO: 1379 - RNA, 21 nt, synthetic construct
  misc_feature 1..21: note = Targeting Domain
  source 1..21: mol_type = other RNA
gaggagttcctggaagccttc

SEQ ID NO: 1380 - RNA, 22 nt, synthetic construct
  misc_feature 1..22: note = Targeting Domain
  source 1..22: mol_type = other RNA
ggaggagttcctggaagccttc

SEQ ID NO: 1381 - RNA, 18 nt, synthetic construct
  misc_feature 1..18: note = Targeting Domain
  source 1..18: mol_type = other RNA
gggtgatcttgttgaagg

SEQ ID NO: 1382 - RNA, 19 nt, synthetic construct
  misc_feature 1..19: note = Targeting Domain
  source 1..19: mol_type = other RNA
ggggtgatcttgttgaagg

SEQ ID NO: 1383 - RNA, 20 nt, synthetic construct
  misc_feature 1..20: note = Targeting Domain
  source 1..20: mol_type = other RNA
gggggtgatcttgttgaagg

SEQ ID NO: 1384 - RNA, 23 nt, synthetic construct
  misc_feature 1..23: note = Targeting Domain
  source 1..23: mol_type = other RNA
gttgggggtgatcttgttgaagg

SEQ ID NO: 1385 - RNA, 24 nt, synthetic construct
  misc_feature 1..24: note = Targeting Domain
  source 1..24: mol_type = other RNA
ggttgggggtgatcttgttgaagg

SEQ ID NO: 1386 - RNA, 18 nt, synthetic construct
  misc_feature 1..18: note = Targeting Domain
  source 1..18: mol_type = other RNA
ggctggttgagggtacgg

SEQ ID NO: 1387 - RNA, 22 nt, synthetic construct
  misc_feature 1..22: note = Targeting Domain
  source 1..22: mol_type = other RNA
gtctggctggttgagggtacgg

SEQ ID NO: 1388 - RNA, 18 nt, synthetic construct
  misc_feature 1..18: note = Targeting Domain
  source 1..18: mol_type = other RNA
gggtgatcctgatcatgg

SEQ ID NO: 1389 - RNA, 21 nt, synthetic construct
  misc_feature 1..21: note = Targeting Domain
  source 1..21: mol_type = other RNA
gttgggtgatcctgatcatgg

SEQ ID NO: 1390 - RNA, 22 nt, synthetic construct
  misc_feature 1..22: note = Targeting Domain
  source 1..22: mol_type = other RNA
ggttgggtgatcctgatcatgg

SEQ ID NO: 1391 - RNA, 22 nt, synthetic construct
  misc_feature 1..22: note = Targeting Domain
  source 1..22: mol_type = other RNA
gtcttctgggcagcatctccct

SEQ ID NO: 1392 - RNA, 18 nt, synthetic construct
  misc_feature 1..18: note = Targeting Domain
  source 1..18: mol_type = other RNA
ggcgaactcagccaggtt

SEQ ID NO: 1393 - RNA, 21 nt, synthetic construct
  misc_feature 1..21: note = Targeting Domain
  source 1..21: mol_type = other RNA
gaaggcgaactcagccaggtt

SEQ ID NO: 1394 - RNA, 24 nt, synthetic construct
  misc_feature 1..24: note = Targeting Domain
  source 1..24: mol_type = other RNA
gctgaaggcgaactcagccaggtt

SEQ ID NO: 1395 - RNA, 21 nt, synthetic construct
  misc_feature 1..21: note = Targeting Domain
  source 1..21: mol_type = other RNA
gagctggctgtctggctggtt

SEQ ID NO: 1396 - RNA, 22 nt, synthetic construct
  misc_feature 1..22: note = Targeting Domain
  source 1..22: mol_type = other RNA
ggagctggctgtctggctggtt

SEQ ID NO: 1397 - RNA, 19 nt, synthetic construct
  misc_feature 1..19: note = Targeting Domain
  source 1..19: mol_type = other RNA
gatcaacgattacgtggag

SEQ ID NO: 1398 - RNA, 24 nt, synthetic construct
  misc_feature 1..24: note = Targeting Domain
  source 1..24: mol_type = other RNA
gacagagacacagtttttgctctg

SEQ ID NO: 1399 - RNA, 22 nt, synthetic construct
  misc_feature 1..22: note = Targeting Domain
  source 1..22: mol_type = other RNA
gaagctagtggataagtttttg

SEQ ID NO: 1400 - RNA, 18 nt, synthetic construct
  misc_feature 1..18: note = Targeting Domain
  source 1..18: mol_type = other RNA
gatacatcccaccatgat

SEQ ID NO: 1401 - RNA, 22 nt, synthetic construct
  misc_feature 1..22: note = Targeting Domain
  source 1..22: mol_type = other RNA
gacagatacatcccaccatgat

SEQ ID NO: 1402 - RNA, 23 nt, synthetic construct
  misc_feature 1..23: note = Targeting Domain
  source 1..23: mol_type = other RNA
gcctggtccctgtctccctggct

SEQ ID NO: 1403 - RNA, 22 nt, synthetic construct
  misc_feature 1..22: note = Targeting Domain
  source 1..22: mol_type = other RNA
gaagggtactcaagggaaaatt

SEQ ID NO: 1404 - RNA, 24 nt, synthetic construct
  misc_feature 1..24: note = Targeting Domain
  source 1..24: mol_type = other RNA
gagaagggtactcaagggaaaatt

SEQ ID NO: 1405 - RNA, 22 nt, synthetic construct
  misc_feature 1..22: note = Targeting Domain
  source 1..22: mol_type = other RNA
tgaccaaatccacaattttccc

SEQ ID NO: 1406 - RNA, 23 nt, synthetic construct
  misc_feature 1..23: note = Targeting Domain
  source 1..23: mol_type = other RNA
ttgaccaaatccacaattttccc

SEQ ID NO: 1407 - RNA, 24 nt, synthetic construct
  misc_feature 1..24: note = Targeting Domain
  source 1..24: mol_type = other RNA
cttgaccaaatccacaattttccc

SEQ ID NO: 1408 - RNA, 21 nt, synthetic construct
  misc_feature 1..21: note = Targeting Domain
  source 1..21: mol_type = other RNA
caggccctccaggatttcatc

SEQ ID NO: 1409 - RNA, 22 nt, synthetic construct
  misc_feature 1..22: note = Targeting Domain
  source 1..22: mol_type = other RNA
tcaggccctccaggatttcatc

SEQ ID NO: 1410 - RNA, 23 nt, synthetic construct
  misc_feature 1..23: note = Targeting Domain
  source 1..23: mol_type = other RNA
ttcaggccctccaggatttcatc

SEQ ID NO: 1411 - RNA, 24 nt, synthetic construct
  misc_feature 1..24: note = Targeting Domain
  source 1..24: mol_type = other RNA
attcaggccctccaggatttcatc

SEQ ID NO: 1412 - RNA, 22 nt, synthetic construct
  misc_feature 1..22: note = Targeting Domain
  source 1..22: mol_type = other RNA
tgaggttgaaattcaggccctc

SEQ ID NO: 1413 - RNA, 24 nt, synthetic construct
  misc_feature 1..24: note = Targeting Domain
  source 1..24: mol_type = other RNA
cgtgaggttgaaattcaggccctc

SEQ ID NO: 1414 - RNA, 18 nt, synthetic construct
  misc_feature 1..18: note = Targeting Domain
  source 1..18: mol_type = other RNA
ttcatggatctgagcctc

SEQ ID NO: 1415 - RNA, 19 nt, synthetic construct
  misc_feature 1..19: note = Targeting Domain
  source 1..19: mol_type = other RNA
cttcatggatctgagcctc

SEQ ID NO: 1416 - RNA, 22 nt, synthetic construct
  misc_feature 1..22: note = Targeting Domain
  source 1..22: mol_type = other RNA
agccttcatggatctgagcctc

SEQ ID NO: 1417 - RNA, 23 nt, synthetic construct
  misc_feature 1..23: note = Targeting Domain
  source 1..23: mol_type = other RNA
aagccttcatggatctgagcctc

SEQ ID NO: 1418 - RNA, 23 nt, synthetic construct
  misc_feature 1..23: note = Targeting Domain
  source 1..23: mol_type = other RNA
cggaggagttcctggaagccttc

SEQ ID NO: 1419 - RNA, 24 nt, synthetic construct
  misc_feature 1..24: note = Targeting Domain
  source 1..24: mol_type = other RNA
acggaggagttcctggaagccttc

SEQ ID NO: 1420 - RNA, 21 nt, synthetic construct
  misc_feature 1..21: note = Targeting Domain
  source 1..21: mol_type = other RNA
tgggggtgatcttgttgaagg

SEQ ID NO: 1421 - RNA, 22 nt, synthetic construct
  misc_feature 1..22: note = Targeting Domain
  source 1..22: mol_type = other RNA
ttgggggtgatcttgttgaagg

SEQ ID NO: 1422 - RNA, 19 nt, synthetic construct
  misc_feature 1..19: note = Targeting Domain
  source 1..19: mol_type = other RNA
tggctggttgagggtacgg

SEQ ID NO: 1423 - RNA, 21 nt, synthetic construct
  misc_feature 1..21: note = Targeting Domain
  source 1..21: mol_type = other RNA
tctggctggttgagggtacgg

SEQ ID NO: 1424 - RNA, 23 nt, synthetic construct
  misc_feature 1..23: note = Targeting Domain
  source 1..23: mol_type = other RNA
tgtctggctggttgagggtacgg

SEQ ID NO: 1425 - RNA, 24 nt, synthetic construct
  misc_feature 1..24: note = Targeting Domain
  source 1..24: mol_type = other RNA
ctgtctggctggttgagggtacgg

SEQ ID NO: 1426 - RNA, 19 nt, synthetic construct
  misc_feature 1..19: note = Targeting Domain
  source 1..19: mol_type = other RNA
tgggtgatcctgatcatgg

SEQ ID NO: 1427 - RNA, 23 nt, synthetic construct
  misc_feature 1..23: note = Targeting Domain
  source 1..23: mol_type = other RNA
aggttgggtgatcctgatcatgg

SEQ ID NO: 1428 - RNA, 24 nt, synthetic construct
  misc_feature 1..24: note = Targeting Domain
  source 1..24: mol_type = other RNA
aaggttgggtgatcctgatcatgg

SEQ ID NO: 1429 - RNA, 21 nt, synthetic construct
  misc_feature 1..21: note = Targeting Domain
  source 1..21: mol_type = other RNA
tcttctgggcagcatctccct

SEQ ID NO: 1430 - RNA, 23 nt, synthetic construct
  misc_feature 1..23: note = Targeting Domain
  source 1..23: mol_type = other RNA
tgtcttctgggcagcatctccct

SEQ ID NO: 1431 - RNA, 24 nt, synthetic construct
  misc_feature 1..24: note = Targeting Domain
  source 1..24: mol_type = other RNA
ctgtcttctgggcagcatctccct

SEQ ID NO: 1432 - RNA, 21 nt, synthetic construct
  misc_feature 1..21: note = Targeting Domain
  source 1..21: mol_type = other RNA
cgaagttgacagtgaaggctt

SEQ ID NO: 1433 - RNA, 22 nt, synthetic construct
  misc_feature 1..22: note = Targeting Domain
  source 1..22: mol_type = other RNA
ccgaagttgacagtgaaggctt

SEQ ID NO: 1434 - RNA, 23 nt, synthetic construct
  misc_feature 1..23: note = Targeting Domain
  source 1..23: mol_type = other RNA
cccgaagttgacagtgaaggctt

SEQ ID NO: 1435 - RNA, 24 nt, synthetic construct
  misc_feature 1..24: note = Targeting Domain
  source 1..24: mol_type = other RNA
ccccgaagttgacagtgaaggctt

SEQ ID NO: 1436 - RNA, 19 nt, synthetic construct
  misc_feature 1..19: note = Targeting Domain
  source 1..19: mol_type = other RNA
aggcgaactcagccaggtt

SEQ ID NO: 1437 - RNA, 22 nt, synthetic construct
  misc_feature 1..22: note = Targeting Domain
  source 1..22: mol_type = other RNA
tgaaggcgaactcagccaggtt

SEQ ID NO: 1438 - RNA, 23 nt, synthetic construct
  misc_feature 1..23: note = Targeting Domain
  source 1..23: mol_type = other RNA
ctgaaggcgaactcagccaggtt

SEQ ID NO: 1439 - RNA, 23 nt, synthetic construct
  misc_feature 1..23: note = Targeting Domain
  source 1..23: mol_type = other RNA
tggagctggctgtctggctggtt

SEQ ID NO: 1440 - RNA, 24 nt, synthetic construct
  misc_feature 1..24: note = Targeting Domain
  source 1..24: mol_type = other RNA
ctggagctggctgtctggctggtt

SEQ ID NO: 1441 - RNA, 18 nt, synthetic construct
  misc_feature 1..18: note = Targeting Domain
  source 1..18: mol_type = other RNA
agcgagggcctgaagcta

SEQ ID NO: 1442 - RNA, 19 nt, synthetic construct
  misc_feature 1..19: note = Targeting Domain
  source 1..19: mol_type = other RNA
cagcgagggcctgaagcta

SEQ ID NO: 1443 - RNA, 20 nt, synthetic construct
  misc_feature 1..20: note = Targeting Domain
  source 1..20: mol_type = other RNA
tcagcgagggcctgaagcta

SEQ ID NO: 1444 - RNA, 21 nt, synthetic construct
  misc_feature 1..21: note = Targeting Domain
  source 1..21: mol_type = other RNA
ctcagcgagggcctgaagcta

SEQ ID NO: 1445 - RNA, 22 nt, synthetic construct
  misc_feature 1..22: note = Targeting Domain
  source 1..22: mol_type = other RNA
cctcagcgagggcctgaagcta

SEQ ID NO: 1446 - RNA, 23 nt, synthetic construct
  misc_feature 1..23: note = Targeting Domain
  source 1..23: mol_type = other RNA
tcctcagcgagggcctgaagcta

SEQ ID NO: 1447 - RNA, 24 nt, synthetic construct
  misc_feature 1..24: note = Targeting Domain
  source 1..24: mol_type = other RNA
ttcctcagcgagggcctgaagcta

SEQ ID NO: 1448 - RNA, 21 nt, synthetic construct
  misc_feature 1..21: note = Targeting Domain
  source 1..21: mol_type = other RNA
cacgatgaaatcctggagggc

SEQ ID NO: 1449 - RNA, 22 nt, synthetic construct
  misc_feature 1..22: note = Targeting Domain
  source 1..22: mol_type = other RNA
tcacgatgaaatcctggagggc

SEQ ID NO: 1450 - RNA, 23 nt, synthetic construct
  misc_feature 1..23: note = Targeting Domain
  source 1..23: mol_type = other RNA
ctcacgatgaaatcctggagggc

SEQ ID NO: 1451 - RNA, 24 nt, synthetic construct
  misc_feature 1..24: note = Targeting Domain
  source 1..24: mol_type = other RNA
actcacgatgaaatcctggagggc

SEQ ID NO: 1452 - RNA, 18 nt, synthetic construct
  misc_feature 1..18: note = Targeting Domain
  source 1..18: mol_type = other RNA
atcaacgattacgtggag

SEQ ID NO: 1453 - RNA, 20 nt, synthetic construct
  misc_feature 1..20: note = Targeting Domain
  source 1..20: mol_type = other RNA
agatcaacgattacgtggag

SEQ ID NO: 1454 - RNA, 21 nt, synthetic construct
  misc_feature 1..21: note = Targeting Domain
  source 1..21: mol_type = other RNA
cagatcaacgattacgtggag

SEQ ID NO: 1455 - RNA, 22 nt, synthetic construct
  misc_feature 1..22: note = Targeting Domain
  source 1..22: mol_type = other RNA
acagatcaacgattacgtggag

SEQ ID NO: 1456 - RNA, 23 nt, synthetic construct
  misc_feature 1..23: note = Targeting Domain
  source 1..23: mol_type = other RNA
aacagatcaacgattacgtggag

SEQ ID NO: 1457 - RNA, 24 nt, synthetic construct
  misc_feature 1..24: note = Targeting Domain
  source 1..24: mol_type = other RNA
aaacagatcaacgattacgtggag

SEQ ID NO: 1458 - RNA, 18 nt, synthetic construct
  misc_feature 1..18: note = Targeting Domain
  source 1..18: mol_type = other RNA
agatcacccccaacctgg

SEQ ID NO: 1459 - RNA, 19 nt, synthetic construct
  misc_feature 1..19: note = Targeting Domain
  source 1..19: mol_type = other RNA
aagatcacccccaacctgg

SEQ ID NO: 1460 - RNA, 20 nt, synthetic construct
  misc_feature 1..20: note = Targeting Domain
  source 1..20: mol_type = other RNA
caagatcacccccaacctgg

SEQ ID NO: 1461 - RNA, 21 nt, synthetic construct
  misc_feature 1..21: note = Targeting Domain
  source 1..21: mol_type = other RNA
acaagatcacccccaacctgg

SEQ ID NO: 1462 - RNA, 22 nt, synthetic construct
  misc_feature 1..22: note = Targeting Domain
  source 1..22: mol_type = other RNA
aacaagatcacccccaacctgg

SEQ ID NO: 1463 - RNA, 23 nt, synthetic construct
  misc_feature 1..23: note = Targeting Domain
  source 1..23: mol_type = other RNA
caacaagatcacccccaacctgg

SEQ ID NO: 1464 - RNA, 24 nt, synthetic construct
  misc_feature 1..24: note = Targeting Domain
  source 1..24: mol_type = other RNA
tcaacaagatcacccccaacctgg

SEQ ID NO: 1465 - RNA, 21 nt, synthetic construct
  misc_feature 1..21: note = Targeting Domain
  source 1..21: mol_type = other RNA
agagacacagtttttgctctg

SEQ ID NO: 1466 - RNA, 22 nt, synthetic construct
  misc_feature 1..22: note = Targeting Domain
  source 1..22: mol_type = other RNA
cagagacacagtttttgctctg

SEQ ID NO: 1467 - RNA, 23 nt, synthetic construct
  misc_feature 1..23: note = Targeting Domain
  source 1..23: mol_type = other RNA
acagagacacagtttttgctctg

SEQ ID NO: 1468 - RNA, 21 nt, synthetic construct
  misc_feature 1..21: note = Targeting Domain
  source 1..21: mol_type = other RNA
aagctagtggataagtttttg

SEQ ID NO: 1469 - RNA, 23 nt, synthetic construct
  misc_feature 1..23: note = Targeting Domain
  source 1..23: mol_type = other RNA
tgaagctagtggataagtttttg

SEQ ID NO: 1470 - RNA, 24 nt, synthetic construct
  misc_feature 1..24: note = Targeting Domain
  source 1..24: mol_type = other RNA
ctgaagctagtggataagtttttg

SEQ ID NO: 1471 - RNA, 19 nt, synthetic construct
  misc_feature 1..19: note = Targeting Domain
  source 1..19: mol_type = other RNA
agatacatcccaccatgat

SEQ ID NO: 1472 - RNA, 20 nt, synthetic construct
  misc_feature 1..20: note = Targeting Domain
  source 1..20: mol_type = other RNA
cagatacatcccaccatgat

SEQ ID NO: 1473 - RNA, 21 nt, synthetic construct
  misc_feature 1..21: note = Targeting Domain
  source 1..21: mol_type = other RNA
acagatacatcccaccatgat

SEQ ID NO: 1474 - RNA, 23 nt, synthetic construct
  misc_feature 1..23: note = Targeting Domain
  source 1..23: mol_type = other RNA
agacagatacatcccaccatgat

SEQ ID NO: 1475 - RNA, 24 nt, synthetic construct
  misc_feature 1..24: note = Targeting Domain
  source 1..24: mol_type = other RNA
aagacagatacatcccaccatgat

SEQ ID NO: 1476 - RNA, 21 nt, synthetic construct
  misc_feature 1..21: note = Targeting Domain
  source 1..21: mol_type = other RNA
ctggtccctgtctccctggct

SEQ ID NO: 1477 - RNA, 22 nt, synthetic construct
  misc_feature 1..22: note = Targeting Domain
  source 1..22: mol_type = other RNA
cctggtccctgtctccctggct

SEQ ID NO: 1478 - RNA, 24 nt, synthetic construct
  misc_feature 1..24: note = Targeting Domain
  source 1..24: mol_type = other RNA
tgcctggtccctgtctccctggct

SEQ ID NO: 1479 - RNA, 21 nt, synthetic construct
  misc_feature 1..21: note = Targeting Domain
  source 1..21: mol_type = other RNA
aagggtactcaagggaaaatt

SEQ ID NO: 1480 - RNA, 23 nt, synthetic construct
  misc_feature 1..23: note = Targeting Domain
  source 1..23: mol_type = other RNA
agaagggtactcaagggaaaatt

SEQ ID NO: 1481 - RNA, 18 nt, synthetic construct
  misc_feature 1..18: note = Targeting Domain
  source 1..18: mol_type = other RNA
gccctccaggatttcatc

SEQ ID NO: 1482 - RNA, 19 nt, synthetic construct
  misc_feature 1..19: note = Targeting Domain
  source 1..19: mol_type = other RNA
ggccctccaggatttcatc

SEQ ID NO: 1483 - RNA, 18 nt, synthetic construct
  misc_feature 1..18: note = Targeting Domain
  source 1..18: mol_type = other RNA
gttgaaattcaggccctc

SEQ ID NO: 1484 - RNA, 19 nt, synthetic construct
  misc_feature 1..19: note = Targeting Domain
  source 1..19: mol_type = other RNA
ggttgaaattcaggccctc

SEQ ID NO: 1485 - RNA, 18 nt, synthetic construct
  misc_feature 1..18: note = Targeting Domain
  source 1..18: mol_type = other RNA
gagttcctggaagccttc

SEQ ID NO: 1486 - RNA, 19 nt, synthetic construct
  misc_feature 1..19: note = Targeting Domain
  source 1..19: mol_type = other RNA
ggagttcctggaagccttc

SEQ ID NO: 1487 - RNA, 18 nt, synthetic construct
  misc_feature 1..18: note = Targeting Domain
  source 1..18: mol_type = other RNA
gcacaggcctgccagcag

SEQ ID NO: 1488 - RNA, 21 nt, synthetic construct
  misc_feature 1..21: note = Targeting Domain
  source 1..21: mol_type = other RNA
gcagcacaggcctgccagcag

SEQ ID NO: 1489 - RNA, 22 nt, synthetic construct
  misc_feature 1..22: note = Targeting Domain
  source 1..22: mol_type = other RNA
ggcagcacaggcctgccagcag

SEQ ID NO: 1490 - RNA, 20 nt, synthetic construct
  misc_feature 1..20: note = Targeting Domain
  source 1..20: mol_type = other RNA
gaagttgacagtgaaggctt

SEQ ID NO: 1491 - RNA, 19 nt, synthetic construct
  misc_feature 1..19: note = Targeting Domain
  source 1..19: mol_type = other RNA
gctggctgtctggctggtt

SEQ ID NO: 1492 - RNA, 18 nt, synthetic construct
  misc_feature 1..18: note = Targeting Domain
  source 1..18: mol_type = other RNA
gatgaaatcctggagggc

SEQ ID NO: 1493 - RNA, 18 nt, synthetic construct
  misc_feature 1..18: note = Targeting Domain
  source 1..18: mol_type = other RNA
gacacagtttttgctctg

SEQ ID NO: 1494 - RNA, 20 nt, synthetic construct
  misc_feature 1..20: note = Targeting Domain
  source 1..20: mol_type = other RNA
gagacacagtttttgctctg

SEQ ID NO: 1495 - RNA, 19 nt, synthetic construct
  misc_feature 1..19: note = Targeting Domain
  source 1..19: mol_type = other RNA
gctagtggataagtttttg

SEQ ID NO: 1496 - RNA, 18 nt, synthetic construct
  misc_feature 1..18: note = Targeting Domain
  source 1..18: mol_type = other RNA
gtccctgtctccctggct

SEQ ID NO: 1497 - RNA, 19 nt, synthetic construct
  misc_feature 1..19: note = Targeting Domain
  source 1..19: mol_type = other RNA
ggtccctgtctccctggct

SEQ ID NO: 1498 - RNA, 18 nt, synthetic construct
  misc_feature 1..18: note = Targeting Domain
  source 1..18: mol_type = other RNA
ggtactcaagggaaaatt

SEQ ID NO: 1499 - RNA, 19 nt, synthetic construct
  misc_feature 1..19: note = Targeting Domain
  source 1..19: mol_type = other RNA
gggtactcaagggaaaatt

SEQ ID NO: 1500 - RNA, 18 nt, synthetic construct
  misc_feature 1..18: note = Targeting Domain
  source 1..18: mol_type = other RNA
caaatccacaattttccc

SEQ ID NO: 1501 - RNA, 19 nt, synthetic construct
  misc_feature 1..19: note = Targeting Domain
  source 1..19: mol_type = other RNA
ccaaatccacaattttccc

SEQ ID NO: 1502 - RNA, 20 nt, synthetic construct
  misc_feature 1..20: note = Targeting Domain
  source 1..20: mol_type = other RNA
accaaatccacaattttccc

SEQ ID NO: 1503 - RNA, 20 nt, synthetic construct
  misc_feature 1..20: note = Targeting Domain
  source 1..20: mol_type = other RNA
aggccctccaggatttcatc

SEQ ID NO: 1504 - RNA, 20 nt, synthetic construct
  misc_feature 1..20: note = Targeting Domain
  source 1..20: mol_type = other RNA
aggttgaaattcaggccctc

SEQ ID NO: 1505 - RNA, 20 nt, synthetic construct
  misc_feature 1..20: note = Targeting Domain
  source 1..20: mol_type = other RNA
aggagttcctggaagccttc

SEQ ID NO: 1506 - RNA, 19 nt, synthetic construct
  misc_feature 1..19: note = Targeting Domain
  source 1..19: mol_type = other RNA
agcacaggcctgccagcag

SEQ ID NO: 1507 - RNA, 20 nt, synthetic construct
  misc_feature 1..20: note = Targeting Domain
  source 1..20: mol_type = other RNA
cagcacaggcctgccagcag

SEQ ID NO: 1508 - RNA, 23 nt, synthetic construct
  misc_feature 1..23: note = Targeting Domain
  source 1..23: mol_type = other RNA
aggcagcacaggcctgccagcag

SEQ ID NO: 1509 - RNA, 24 nt, synthetic construct
  misc_feature 1..24: note = Targeting Domain
  source 1..24: mol_type = other RNA
caggcagcacaggcctgccagcag

SEQ ID NO: 1510 - RNA, 18 nt, synthetic construct
  misc_feature 1..18: note = Targeting Domain
  source 1..18: mol_type = other RNA
tctgggcagcatctccct

SEQ ID NO: 1511 - RNA, 19 nt, synthetic construct
  misc_feature 1..19: note = Targeting Domain
  source 1..19: mol_type = other RNA
ttctgggcagcatctccct

SEQ ID NO: 1512 - RNA, 18 nt, synthetic construct
  misc_feature 1..18: note = Targeting Domain
  source 1..18: mol_type = other RNA
agttgacagtgaaggctt

SEQ ID NO: 1513 - RNA, 19 nt, synthetic construct
  misc_feature 1..19: note = Targeting Domain
  source 1..19: mol_type = other RNA
aagttgacagtgaaggctt

SEQ ID NO: 1514 - RNA, 18 nt, synthetic construct
  misc_feature 1..18: note = Targeting Domain
  source 1..18: mol_type = other RNA
ctggctgtctggctggtt

SEQ ID NO: 1515 - RNA, 20 nt, synthetic construct
  misc_feature 1..20: note = Targeting Domain
  source 1..20: mol_type = other RNA
agctggctgtctggctggtt

SEQ ID NO: 1516 - RNA, 19 nt, synthetic construct
  misc_feature 1..19: note = Targeting Domain
  source 1..19: mol_type = other RNA
cgatgaaatcctggagggc

SEQ ID NO: 1517 - RNA, 20 nt, synthetic construct
  misc_feature 1..20: note = Targeting Domain
  source 1..20: mol_type = other RNA
acgatgaaatcctggagggc

SEQ ID NO: 1518 - RNA, 19 nt, synthetic construct
  misc_feature 1..19: note = Targeting Domain
  source 1..19: mol_type = other RNA
agacacagtttttgctctg

SEQ ID NO: 1519 - RNA, 18 nt, synthetic construct
  misc_feature 1..18: note = Targeting Domain
  source 1..18: mol_type = other RNA
ctagtggataagtttttg

SEQ ID NO: 1520 - RNA, 20 nt, synthetic construct
  misc_feature 1..20: note = Targeting Domain
  source 1..20: mol_type = other RNA
agctagtggataagtttttg

SEQ ID NO: 1521 - RNA, 20 nt, synthetic construct
  misc_feature 1..20: note = Targeting Domain
  source 1..20: mol_type = other RNA
tggtccctgtctccctggct

SEQ ID NO: 1522 - RNA, 20 nt, synthetic construct
  misc_feature 1..20: note = Targeting Domain
  source 1..20: mol_type = other RNA
agggtactcaagggaaaatt

SEQ ID NO: 1523 - RNA, 18 nt, synthetic construct
  misc_feature 1..18: note = Targeting Domain
  source 1..18: mol_type = other RNA
gtgtccccgaagttgaca

SEQ ID NO: 1524 - RNA, 19 nt, synthetic construct
  misc_feature 1..19: note = Targeting Domain
  source 1..19: mol_type = other RNA
ggtgtccccgaagttgaca

SEQ ID NO: 1525 - RNA, 20 nt, synthetic construct
  misc_feature 1..20: note = Targeting Domain
  source 1..20: mol_type = other RNA
cggtgtccccgaagttgaca

SEQ ID NO: 1526 - RNA, 21 nt, synthetic construct
  misc_feature 1..21: note = Targeting Domain
  source 1..21: mol_type = other RNA
tcggtgtccccgaagttgaca

SEQ ID NO: 1527 - RNA, 22 nt, synthetic construct
  misc_feature 1..22: note = Targeting Domain
  source 1..22: mol_type = other RNA
ttcggtgtccccgaagttgaca

SEQ ID NO: 1528 - RNA, 23 nt, synthetic construct
  misc_feature 1..23: note = Targeting Domain
  source 1..23: mol_type = other RNA
cttcggtgtccccgaagttgaca

SEQ ID NO: 1529 - RNA, 24 nt, synthetic construct
  misc_feature 1..24: note = Targeting Domain
  source 1..24: mol_type = other RNA
tcttcggtgtccccgaagttgaca

SEQ ID NO: 1530 - RNA, 18 nt, synthetic construct
  misc_feature 1..18: note = Targeting Domain
  source 1..18: mol_type = other RNA
tgtcagccttggtcccca

SEQ ID NO: 1531 - RNA, 19 nt, synthetic construct
  misc_feature 1..19: note = Targeting Domain
  source 1..19: mol_type = other RNA
gtgtcagccttggtcccca

SEQ ID NO: 1532 - RNA, 21 nt, synthetic construct
  misc_feature 1..21: note = Targeting Domain
  source 1..21: mol_type = other RNA
gagtgtcagccttggtcccca

SEQ ID NO: 1533 - RNA, 22 nt, synthetic construct
  misc_feature 1..22: note = Targeting Domain
  source 1..22: mol_type = other RNA
tgagtgtcagccttggtcccca

SEQ ID NO: 1534 - RNA, 23 nt, synthetic construct
  misc_feature 1..23: note = Targeting Domain
  source 1..23: mol_type = other RNA
gtgagtgtcagccttggtcccca

SEQ ID NO: 1535 - RNA, 24 nt, synthetic construct
  misc_feature 1..24: note = Targeting Domain
  source 1..24: mol_type = other RNA
cgtgagtgtcagccttggtcccca

SEQ ID NO: 1536 - RNA, 18 nt, synthetic construct
  misc_feature 1..18: note = Targeting Domain
  source 1..18: mol_type = other RNA
cctggggatcctcagcca

SEQ ID NO: 1537 - RNA, 19 nt, synthetic construct
  misc_feature 1..19: note = Targeting Domain
  source 1..19: mol_type = other RNA
ccctggggatcctcagcca

SEQ ID NO: 1538 - RNA, 21 nt, synthetic construct
  misc_feature 1..21: note = Targeting Domain
  source 1..21: mol_type = other RNA
ctccctggggatcctcagcca

SEQ ID NO: 1539 - RNA, 22 nt, synthetic construct
  misc_feature 1..22: note = Targeting Domain
  source 1..22: mol_type = other RNA
tctccctggggatcctcagcca

SEQ ID NO: 1540 - RNA, 23 nt, synthetic construct
  misc_feature 1..23: note = Targeting Domain
  source 1..23: mol_type = other RNA
atctccctggggatcctcagcca

SEQ ID NO: 1541 - RNA, 24 nt, synthetic construct
  misc_feature 1..24: note = Targeting Domain
  source 1..24: mol_type = other RNA
catctccctggggatcctcagcca

SEQ ID NO: 1542 - RNA, 18 nt, synthetic construct
  misc_feature 1..18: note = Targeting Domain
  source 1..18: mol_type = other RNA
aggctgtagcgatgctca

SEQ ID NO: 1543 - RNA, 19 nt, synthetic construct
  misc_feature 1..19: note = Targeting Domain
  source 1..19: mol_type = other RNA
aaggctgtagcgatgctca

SEQ ID NO: 1544 - RNA, 20 nt, synthetic construct
  misc_feature 1..20: note = Targeting Domain
  source 1..20: mol_type = other RNA
aaaggctgtagcgatgctca

SEQ ID NO: 1545 - RNA, 21 nt, synthetic construct
  misc_feature 1..21: note = Targeting Domain
  source 1..21: mol_type = other RNA
caaaggctgtagcgatgctca

SEQ ID NO: 1546 - RNA, 22 nt, synthetic construct
  misc_feature 1..22: note = Targeting Domain
  source 1..22: mol_type = other RNA
gcaaaggctgtagcgatgctca

SEQ ID NO: 1547 - RNA, 23 nt, synthetic construct
  misc_feature 1..23: note = Targeting Domain
  source 1..23: mol_type = other RNA
tgcaaaggctgtagcgatgctca

SEQ ID NO: 1548 - RNA, 24 nt, synthetic construct
  misc_feature 1..24: note = Targeting Domain
  source 1..24: mol_type = other RNA
ttgcaaaggctgtagcgatgctca

SEQ ID NO: 1549 - RNA, 18 nt, synthetic construct
  misc_feature 1..18: note = Targeting Domain
  source 1..18: mol_type = other RNA
cggcattgtcctgcaaga

SEQ ID NO: 1550 - RNA, 19 nt, synthetic construct
  misc_feature 1..19: note = Targeting Domain
  source 1..19: mol_type = other RNA
acggcattgtcctgcaaga

SEQ ID NO: 1551 - RNA, 20 nt, synthetic construct
  misc_feature 1..20: note = Targeting Domain
  source 1..20: mol_type = other RNA
gacggcattgtcctgcaaga

SEQ ID NO: 1552 - RNA, 21 nt, synthetic construct
  misc_feature 1..21: note = Targeting Domain
  source 1..21: mol_type = other RNA
agacggcattgtcctgcaaga

SEQ ID NO: 1553 - RNA, 22 nt, synthetic construct
  misc_feature 1..22: note = Targeting Domain
  source 1..22: mol_type = other RNA
aagacggcattgtcctgcaaga

SEQ ID NO: 1554 - RNA, 23 nt, synthetic construct
  misc_feature 1..23: note = Targeting Domain
  source 1..23: mol_type = other RNA
gaagacggcattgtcctgcaaga

SEQ ID NO: 1555 - RNA, 24 nt, synthetic construct
  misc_feature 1..24: note = Targeting Domain
  source 1..24: mol_type = other RNA
agaagacggcattgtcctgcaaga

SEQ ID NO: 1556 - RNA, 18 nt, synthetic construct
  misc_feature 1..18: note = Targeting Domain
  source 1..18: mol_type = other RNA
tgtcctgcaagacagaga

SEQ ID NO: 1557 - RNA, 19 nt, synthetic construct
  misc_feature 1..19: note = Targeting Domain
  source 1..19: mol_type = other RNA
ttgtcctgcaagacagaga

SEQ ID NO: 1558 - RNA, 21 nt, synthetic construct
  misc_feature 1..21: note = Targeting Domain
  source 1..21: mol_type = other RNA
cattgtcctgcaagacagaga

SEQ ID NO: 1559 - RNA, 22 nt, synthetic construct
  misc_feature 1..22: note = Targeting Domain
  source 1..22: mol_type = other RNA
gcattgtcctgcaagacagaga

SEQ ID NO: 1560 - RNA, 23 nt, synthetic construct
  misc_feature 1..23: note = Targeting Domain
  source 1..23: mol_type = other RNA
ggcattgtcctgcaagacagaga

SEQ ID NO: 1561 - RNA, 24 nt, synthetic construct
  misc_feature 1..24: note = Targeting Domain
  source 1..24: mol_type = other RNA
cggcattgtcctgcaagacagaga

SEQ ID NO: 1562 - RNA, 18 nt, synthetic construct
  misc_feature 1..18: note = Targeting Domain
  source 1..18: mol_type = other RNA
ggaggatgccccacgaga

SEQ ID NO: 1563 - RNA, 19 nt, synthetic construct
  misc_feature 1..19: note = Targeting Domain
  source 1..19: mol_type = other RNA
aggaggatgccccacgaga

SEQ ID NO: 1564 - RNA, 20 nt, synthetic construct
  misc_feature 1..20: note = Targeting Domain
  source 1..20: mol_type = other RNA
caggaggatgccccacgaga

SEQ ID NO: 1565 - RNA, 21 nt, synthetic construct
  misc_feature 1..21: note = Targeting Domain
  source 1..21: mol_type = other RNA
gcaggaggatgccccacgaga

SEQ ID NO: 1566 - RNA, 22 nt, synthetic construct
  misc_feature 1..22: note = Targeting Domain
  source 1..22: mol_type = other RNA
agcaggaggatgccccacgaga

SEQ ID NO: 1567 - RNA, 23 nt, synthetic construct
  misc_feature 1..23: note = Targeting Domain
  source 1..23: mol_type = other RNA
cagcaggaggatgccccacgaga

SEQ ID NO: 1568 - RNA, 24 nt, synthetic construct
  misc_feature 1..24: note = Targeting Domain
  source 1..24: mol_type = other RNA
ccagcaggaggatgccccacgaga

SEQ ID NO: 1569 - RNA, 18 nt, synthetic construct
  misc_feature 1..18: note = Targeting Domain
  source 1..18: mol_type = other RNA
gatcctcagccagggaga

SEQ ID NO: 1570 - RNA, 19 nt, synthetic construct
  misc_feature 1..19: note = Targeting Domain
  source 1..19: mol_type = other RNA
ggatcctcagccagggaga

SEQ ID NO: 1571 - RNA, 20 nt, synthetic construct
  misc_feature 1..20: note = Targeting Domain
  source 1..20: mol_type = other RNA
gggatcctcagccagggaga

SEQ ID NO: 1572 - RNA, 21 nt, synthetic construct
  misc_feature 1..21: note = Targeting Domain
  source 1..21: mol_type = other RNA
ggggatcctcagccagggaga

SEQ ID NO: 1573 - RNA, 22 nt, synthetic construct
  misc_feature 1..22: note = Targeting Domain
  source 1..22: mol_type = other RNA
tggggatcctcagccagggaga

SEQ ID NO: 1574 - RNA, 23 nt, synthetic construct
  misc_feature 1..23: note = Targeting Domain
  source 1..23: mol_type = other RNA
ctggggatcctcagccagggaga

SEQ ID NO: 1575 - RNA, 24 nt, synthetic construct
  misc_feature 1..24: note = Targeting Domain
  source 1..24: mol_type = other RNA
cctggggatcctcagccagggaga

SEQ ID NO: 1576 - RNA, 18 nt, synthetic construct
  misc_feature 1..18: note = Targeting Domain
  source 1..18: mol_type = other RNA
tctggctggttgagggta

SEQ ID NO: 1577 - RNA, 19 nt, synthetic construct
  misc_feature 1..19: note = Targeting Domain
  source 1..19: mol_type = other RNA
gtctggctggttgagggta

SEQ ID NO: 1578 - RNA, 21 nt, synthetic construct
  misc_feature 1..21: note = Targeting Domain
  source 1..21: mol_type = other RNA
ctgtctggctggttgagggta

SEQ ID NO: 1579 - RNA, 22 nt, synthetic construct
  misc_feature 1..22: note = Targeting Domain
  source 1..22: mol_type = other RNA
gctgtctggctggttgagggta

SEQ ID NO: 1580 - RNA, 23 nt, synthetic construct
  misc_feature 1..23: note = Targeting Domain
  source 1..23: mol_type = other RNA
ggctgtctggctggttgagggta

SEQ ID NO: 1581 - RNA, 24 nt, synthetic construct
  misc_feature 1..24: note = Targeting Domain
  source 1..24: mol_type = other RNA
tggctgtctggctggttgagggta

SEQ ID NO: 1582 - RNA, 18 nt, synthetic construct
  misc_feature 1..18: note = Targeting Domain
  source 1..18: mol_type = other RNA
tgagcaaccttaccttta

SEQ ID NO: 1583 - RNA, 19 nt, synthetic construct
  misc_feature 1..19: note = Targeting Domain
  source 1..19: mol_type = other RNA
ttgagcaaccttaccttta

SEQ ID NO: 1584 - RNA, 20 nt, synthetic construct
  misc_feature 1..20: note = Targeting Domain
  source 1..20: mol_type = other RNA
gttgagcaaccttaccttta

SEQ ID NO: 1585 - RNA, 21 nt, synthetic construct
  misc_feature 1..21: note = Targeting Domain
  source 1..21: mol_type = other RNA
ggttgagcaaccttaccttta

SEQ ID NO: 1586 - RNA, 22 nt, synthetic construct
  misc_feature 1..22: note = Targeting Domain
  source 1..22: mol_type = other RNA
tggttgagcaaccttaccttta

SEQ ID NO: 1587 - RNA, 23 nt, synthetic construct
  misc_feature 1..23: note = Targeting Domain
  source 1..23: mol_type = other RNA
ctggttgagcaaccttaccttta

SEQ ID NO: 1588 - RNA, 24 nt, synthetic construct
  misc_feature 1..24: note = Targeting Domain
  source 1..24: mol_type = other RNA
gctggttgagcaaccttaccttta

SEQ ID NO: 1589 - RNA, 18 nt, synthetic construct
  misc_feature 1..18: note = Targeting Domain
  source 1..18: mol_type = other RNA
ggctgtagcgatgctcac

SEQ ID NO: 1590 - RNA, 19 nt, synthetic construct
  misc_feature 1..19: note = Targeting Domain
  source 1..19: mol_type = other RNA
aggctgtagcgatgctcac

SEQ ID NO: 1591 - RNA, 21 nt, synthetic construct
  misc_feature 1..21: note = Targeting Domain
  source 1..21: mol_type = other RNA
aaaggctgtagcgatgctcac

SEQ ID NO: 1592 - RNA, 22 nt, synthetic construct
  misc_feature 1..22: note = Targeting Domain
  source 1..22: mol_type = other RNA
caaaggctgtagcgatgctcac

SEQ ID NO: 1593 - RNA, 23 nt, synthetic construct
  misc_feature 1..23: note = Targeting Domain
  source 1..23: mol_type = other RNA
gcaaaggctgtagcgatgctcac

SEQ ID NO: 1594 - RNA, 24 nt, synthetic construct
  misc_feature 1..24: note = Targeting Domain
  source 1..24: mol_type = other RNA
tgcaaaggctgtagcgatgctcac

SEQ ID NO: 1595 - RNA, 18 nt, synthetic construct
  misc_feature 1..18: note = Targeting Domain
  source 1..18: mol_type = other RNA
aaagaagatgtaattcac

SEQ ID NO: 1596 - RNA, 19 nt, synthetic construct
  misc_feature 1..19: note = Targeting Domain
  source 1..19: mol_type = other RNA
taaagaagatgtaattcac

SEQ ID NO: 1597 - RNA, 20 nt, synthetic construct
  misc_feature 1..20: note = Targeting Domain
  source 1..20: mol_type = other RNA
ttaaagaagatgtaattcac

SEQ ID NO: 1598 - RNA, 21 nt, synthetic construct
  misc_feature 1..21: note = Targeting Domain
  source 1..21: mol_type = other RNA
tttaaagaagatgtaattcac

SEQ ID NO: 1599 - RNA, 22 nt, synthetic construct
  misc_feature 1..22: note = Targeting Domain
  source 1..22: mol_type = other RNA
ctttaaagaagatgtaattcac

SEQ ID NO: 1600 - RNA, 23 nt, synthetic construct
  misc_feature 1..23: note = Targeting Domain
  source 1..23: mol_type = other RNA
cctttaaagaagatgtaattcac

SEQ ID NO: 1601 - RNA, 24 nt, synthetic construct
  misc_feature 1..24: note = Targeting Domain
  source 1..24: mol_type = other RNA
acctttaaagaagatgtaattcac

SEQ ID NO: 1602 - RNA, 18 nt, synthetic construct
  misc_feature 1..18: note = Targeting Domain
  source 1..18: mol_type = other RNA
atcctcagccagggagac

SEQ ID NO: 1603 - RNA, 19 nt, synthetic construct
  misc_feature 1..19: note = Targeting Domain
  source 1..19: mol_type = other RNA
gatcctcagccagggagac

SEQ ID NO: 1604 - RNA, 20 nt, synthetic construct
  misc_feature 1..20: note = Targeting Domain
  source 1..20: mol_type = other RNA
ggatcctcagccagggagac

SEQ ID NO: 1605 - RNA, 21 nt, synthetic construct
  misc_feature 1..21: note = Targeting Domain
  source 1..21: mol_type = other RNA
gggatcctcagccagggagac

SEQ ID NO: 1606 - RNA, 22 nt, synthetic construct
  misc_feature 1..22: note = Targeting Domain
  source 1..22: mol_type = other RNA
ggggatcctcagccagggagac

SEQ ID NO: 1607 - RNA, 23 nt, synthetic construct
  misc_feature 1..23: note = Targeting Domain
  source 1..23: mol_type = other RNA
tggggatcctcagccagggagac

SEQ ID NO: 1608 - RNA, 24 nt, synthetic construct
  misc_feature 1..24: note = Targeting Domain
  source 1..24: mol_type = other RNA
ctggggatcctcagccagggagac

SEQ ID NO: 1609 - RNA, 18 nt, synthetic construct
  misc_feature 1..18: note = Targeting Domain
  source 1..18: mol_type = other RNA
ccagcaggaggatgcccc

SEQ ID NO: 1610 - RNA, 19 nt, synthetic construct
  misc_feature 1..19: note = Targeting Domain
  source 1..19: mol_type = other RNA
gccagcaggaggatgcccc

SEQ ID NO: 1611 - RNA, 20 nt, synthetic construct
  misc_feature 1..20: note = Targeting Domain
  source 1..20: mol_type = other RNA
tgccagcaggaggatgcccc

SEQ ID NO: 1612 - RNA, 21 nt, synthetic construct
  misc_feature 1..21: note = Targeting Domain
  source 1..21: mol_type = other RNA
ctgccagcaggaggatgcccc

SEQ ID NO: 1613 - RNA, 22 nt, synthetic construct
  misc_feature 1..22: note = Targeting Domain
  source 1..22: mol_type = other RNA
cctgccagcaggaggatgcccc

SEQ ID NO: 1614 - RNA, 23 nt, synthetic construct
  misc_feature 1..23: note = Targeting Domain
  source 1..23: mol_type = other RNA
gcctgccagcaggaggatgcccc

SEQ ID NO: 1615 - RNA, 24 nt, synthetic construct
  misc_feature 1..24: note = Targeting Domain
  source 1..24: mol_type = other RNA
ggcctgccagcaggaggatgcccc

SEQ ID NO: 1616 - RNA, 18 nt, synthetic construct
  misc_feature 1..18: note = Targeting Domain
  source 1..18: mol_type = other RNA
gtgtcagccttggtcccc

SEQ ID NO: 1617 - RNA, 19 nt, synthetic construct
  misc_feature 1..19: note = Targeting Domain
  source 1..19: mol_type = other RNA
agtgtcagccttggtcccc

SEQ ID NO: 1618 - RNA, 20 nt, synthetic construct
  misc_feature 1..20: note = Targeting Domain
  source 1..20: mol_type = other RNA
gagtgtcagccttggtcccc

SEQ ID NO: 1619 - RNA, 21 nt, synthetic construct
  misc_feature 1..21: note = Targeting Domain
  source 1..21: mol_type = other RNA
tgagtgtcagccttggtcccc

SEQ ID NO: 1620 - RNA, 22 nt, synthetic construct
  misc_feature 1..22: note = Targeting Domain
  source 1..22: mol_type = other RNA
gtgagtgtcagccttggtcccc

SEQ ID NO: 1621 - RNA, 23 nt, synthetic construct
  misc_feature 1..23: note = Targeting Domain
  source 1..23: mol_type = other RNA
cgtgagtgtcagccttggtcccc

SEQ ID NO: 1622 - RNA, 24 nt, synthetic construct
  misc_feature 1..24: note = Targeting Domain
  source 1..24: mol_type = other RNA
tcgtgagtgtcagccttggtcccc

SEQ ID NO: 1623 - RNA, 18 nt, synthetic construct
  misc_feature 1..18: note = Targeting Domain
  source 1..18: mol_type = other RNA
ttctgggcagcatctccc

SEQ ID NO: 1624 - RNA, 19 nt, synthetic construct
  misc_feature 1..19: note = Targeting Domain
  source 1..19: mol_type = other RNA
cttctgggcagcatctccc

SEQ ID NO: 1625 - RNA, 21 nt, synthetic construct
  misc_feature 1..21: note = Targeting Domain
  source 1..21: mol_type = other RNA
gtcttctgggcagcatctccc

SEQ ID NO: 1626 - RNA, 22 nt, synthetic construct
  misc_feature 1..22: note = Targeting Domain
  source 1..22: mol_type = other RNA
tgtcttctgggcagcatctccc

SEQ ID NO: 1627 - RNA, 23 nt, synthetic construct
  misc_feature 1..23: note = Targeting Domain
  source 1..23: mol_type = other RNA
ctgtcttctgggcagcatctccc

SEQ ID NO: 1628 - RNA, 24 nt, synthetic construct
  misc_feature 1..24: note = Targeting Domain
  source 1..24: mol_type = other RNA
tctgtcttctgggcagcatctccc

SEQ ID NO: 1629 - RNA, 18 nt, synthetic construct
  misc_feature 1..18: note = Targeting Domain
  source 1..18: mol_type = other RNA
agtgtcagccttggtccc

SEQ ID NO: 1630 - RNA, 19 nt, synthetic construct
  misc_feature 1..19: note = Targeting Domain
  source 1..19: mol_type = other RNA
gagtgtcagccttggtccc

SEQ ID NO: 1631 - RNA, 20 nt, synthetic construct
  misc_feature 1..20: note = Targeting Domain
  source 1..20: mol_type = other RNA
tgagtgtcagccttggtccc

SEQ ID NO: 1632 - RNA, 21 nt, synthetic construct
  misc_feature 1..21: note = Targeting Domain
  source 1..21: mol_type = other RNA
gtgagtgtcagccttggtccc

SEQ ID NO: 1633 - RNA, 22 nt, synthetic construct
  misc_feature 1..22: note = Targeting Domain
  source 1..22: mol_type = other RNA
cgtgagtgtcagccttggtccc

SEQ ID NO: 1634 - RNA, 23 nt, synthetic construct
  misc_feature 1..23: note = Targeting Domain
  source 1..23: mol_type = other RNA
tcgtgagtgtcagccttggtccc

SEQ ID NO: 1635 - RNA, 24 nt, synthetic construct
  misc_feature 1..24: note = Targeting Domain
  source 1..24: mol_type = other RNA
atcgtgagtgtcagccttggtccc

SEQ ID NO: 1636 - RNA, 18 nt, synthetic construct
  misc_feature 1..18: note = Targeting Domain
  source 1..18: mol_type = other RNA
ccctggggatcctcagcc

SEQ ID NO: 1637 - RNA, 19 nt, synthetic construct
  misc_feature 1..19: note = Targeting Domain
  source 1..19: mol_type = other RNA
tccctggggatcctcagcc

SEQ ID NO: 1638 - RNA, 21 nt, synthetic construct
  misc_feature 1..21: note = Targeting Domain
  source 1..21: mol_type = other RNA
tctccctggggatcctcagcc

SEQ ID NO: 1639 - RNA, 22 nt, synthetic construct
  misc_feature 1..22: note = Targeting Domain
  source 1..22: mol_type = other RNA
atctccctggggatcctcagcc

SEQ ID NO: 1640 - RNA, 23 nt, synthetic construct
  misc_feature 1..23: note = Targeting Domain
  source 1..23: mol_type = other RNA
catctccctggggatcctcagcc

SEQ ID NO: 1641 - RNA, 24 nt, synthetic construct
  misc_feature 1..24: note = Targeting Domain
  source 1..24: mol_type = other RNA
gcatctccctggggatcctcagcc

SEQ ID NO: 1642 - RNA, 18 nt, synthetic construct
  misc_feature 1..18: note = Targeting Domain
  source 1..18: mol_type = other RNA
tgagcctccggaatctcc

SEQ ID NO: 1643 - RNA, 19 nt, synthetic construct
  misc_feature 1..19: note = Targeting Domain
  source 1..19: mol_type = other RNA
ctgagcctccggaatctcc

SEQ ID NO: 1644 - RNA, 20 nt, synthetic construct
  misc_feature 1..20: note = Targeting Domain
  source 1..20: mol_type = other RNA
tctgagcctccggaatctcc

SEQ ID NO: 1645 - RNA, 21 nt, synthetic construct
  misc_feature 1..21: note = Targeting Domain
  source 1..21: mol_type = other RNA
atctgagcctccggaatctcc

SEQ ID NO: 1646 - RNA, 22 nt, synthetic construct
  misc_feature 1..22: note = Targeting Domain
  source 1..22: mol_type = other RNA
gatctgagcctccggaatctcc

SEQ ID NO: 1647 - RNA, 23 nt, synthetic construct
  misc_feature 1..23: note = Targeting Domain
  source 1..23: mol_type = other RNA
ggatctgagcctccggaatctcc

SEQ ID NO: 1648 - RNA, 24 nt, synthetic construct
  misc_feature 1..24: note = Targeting Domain
  source 1..24: mol_type = other RNA
tggatctgagcctccggaatctcc

SEQ ID NO: 1649 - RNA, 18 nt, synthetic construct
  misc_feature 1..18: note = Targeting Domain
  source 1..18: mol_type = other RNA
cttctgggcagcatctcc

SEQ ID NO: 1650 - RNA, 19 nt, synthetic construct
  misc_feature 1..19: note = Targeting Domain
  source 1..19: mol_type = other RNA
tcttctgggcagcatctcc

SEQ ID NO: 1651 - RNA, 20 nt, synthetic construct
  misc_feature 1..20: note = Targeting Domain
  source 1..20: mol_type = other RNA
gtcttctgggcagcatctcc

SEQ ID NO: 1652 - RNA, 21 nt, synthetic construct
  misc_feature 1..21: note = Targeting Domain
  source 1..21: mol_type = other RNA
tgtcttctgggcagcatctcc

SEQ ID NO: 1653 - RNA, 22 nt, synthetic construct
  misc_feature 1..22: note = Targeting Domain
  source 1..22: mol_type = other RNA
ctgtcttctgggcagcatctcc

SEQ ID NO: 1654 - RNA, 23 nt, synthetic construct
  misc_feature 1..23: note = Targeting Domain
  source 1..23: mol_type = other RNA
tctgtcttctgggcagcatctcc

SEQ ID NO: 1655 - RNA, 24 nt, synthetic construct
  misc_feature 1..24: note = Targeting Domain
  source 1..24: mol_type = other RNA
atctgtcttctgggcagcatctcc

SEQ ID NO: 1656 - RNA, 18 nt, synthetic construct
  misc_feature 1..18: note = Targeting Domain
  source 1..18: mol_type = other RNA
ttggcctcttcggtgtcc

SEQ ID NO: 1657 - RNA, 19 nt, synthetic construct
  misc_feature 1..19: note = Targeting Domain
  source 1..19: mol_type = other RNA
cttggcctcttcggtgtcc

SEQ ID NO: 1658 - RNA, 20 nt, synthetic construct
  misc_feature 1..20: note = Targeting Domain
  source 1..20: mol_type = other RNA
tcttggcctcttcggtgtcc

SEQ ID NO: 1659 - RNA, 21 nt, synthetic construct
  misc_feature 1..21: note = Targeting Domain
  source 1..21: mol_type = other RNA
ttcttggcctcttcggtgtcc

SEQ ID NO: 1660 - RNA, 22 nt, synthetic construct
  misc_feature 1..22: note = Targeting Domain
  source 1..22: mol_type = other RNA
tttcttggcctcttcggtgtcc

SEQ ID NO: 1661 - RNA, 23 nt, synthetic construct
  misc_feature 1..23: note = Targeting Domain
  source 1..23: mol_type = other RNA
gtttcttggcctcttcggtgtcc

SEQ ID NO: 1662 - RNA, 24 nt, synthetic construct
  misc_feature 1..24: note = Targeting Domain
  source 1..24: mol_type = other RNA
tgtttcttggcctcttcggtgtcc

SEQ ID NO: 1663 - RNA, 18 nt, synthetic construct
  misc_feature 1..18: note = Targeting Domain
  source 1..18: mol_type = other RNA
agggtacggaggagttcc

SEQ ID NO: 1664 - RNA, 19 nt, synthetic construct
  misc_feature 1..19: note = Targeting Domain
  source 1..19: mol_type = other RNA
gagggtacggaggagttcc

SEQ ID NO: 1665 - RNA, 21 nt, synthetic construct
  misc_feature 1..21: note = Targeting Domain
  source 1..21: mol_type = other RNA
ttgagggtacggaggagttcc

SEQ ID NO: 1666 - RNA, 22 nt, synthetic construct
  misc_feature 1..22: note = Targeting Domain
  source 1..22: mol_type = other RNA
gttgagggtacggaggagttcc

SEQ ID NO: 1667 - RNA, 23 nt, synthetic construct
  misc_feature 1..23: note = Targeting Domain
  source 1..23: mol_type = other RNA
ggttgagggtacggaggagttcc

SEQ ID NO: 1668 - RNA, 24 nt, synthetic construct
  misc_feature 1..24: note = Targeting Domain
  source 1..24: mol_type = other RNA
tggttgagggtacggaggagttcc

SEQ ID NO: 1669 - RNA, 18 nt, synthetic construct
  misc_feature 1..18: note = Targeting Domain
  source 1..18: mol_type = other RNA
cagcacaggcctgccagc

SEQ ID NO: 1670 - RNA, 19 nt, synthetic construct
  misc_feature 1..19: note = Targeting Domain
  source 1..19: mol_type = other RNA
gcagcacaggcctgccagc

SEQ ID NO: 1671 - RNA, 20 nt, synthetic construct
  misc_feature 1..20: note = Targeting Domain
  source 1..20: mol_type = other RNA
ggcagcacaggcctgccagc

SEQ ID NO: 1672 - RNA, 21 nt, synthetic construct
  misc_feature 1..21: note = Targeting Domain
  source 1..21: mol_type = other RNA
aggcagcacaggcctgccagc

SEQ ID NO: 1673 - RNA, 22 nt, synthetic construct
  misc_feature 1..22: note = Targeting Domain
  source 1..22: mol_type = other RNA
caggcagcacaggcctgccagc

SEQ ID NO: 1674 - RNA, 23 nt, synthetic construct
  misc_feature 1..23: note = Targeting Domain
  source 1..23: mol_type = other RNA
ccaggcagcacaggcctgccagc

SEQ ID NO: 1675 - RNA, 24 nt, synthetic construct
  misc_feature 1..24: note = Targeting Domain
  source 1..24: mol_type = other RNA
accaggcagcacaggcctgccagc

SEQ ID NO: 1676 - RNA, 18 nt, synthetic construct
  misc_feature 1..18: note = Targeting Domain
  source 1..18: mol_type = other RNA
tccctggggatcctcagc

SEQ ID NO: 1677 - RNA, 19 nt, synthetic construct
  misc_feature 1..19: note = Targeting Domain
  source 1..19: mol_type = other RNA
ctccctggggatcctcagc

SEQ ID NO: 1678 - RNA, 20 nt, synthetic construct
  misc_feature 1..20: note = Targeting Domain
  source 1..20: mol_type = other RNA
tctccctggggatcctcagc

SEQ ID NO: 1679 - RNA, 21 nt, synthetic construct
  misc_feature 1..21: note = Targeting Domain
  source 1..21: mol_type = other RNA
atctccctggggatcctcagc

SEQ ID NO: 1680 - RNA, 22 nt, synthetic construct
  misc_feature 1..22: note = Targeting Domain
  source 1..22: mol_type = other RNA
catctccctggggatcctcagc

SEQ ID NO: 1681 - RNA, 23 nt, synthetic construct
  misc_feature 1..23: note = Targeting Domain
  source 1..23: mol_type = other RNA
gcatctccctggggatcctcagc

SEQ ID NO: 1682 - RNA, 24 nt, synthetic construct
  misc_feature 1..24: note = Targeting Domain
  source 1..24: mol_type = other RNA
agcatctccctggggatcctcagc

SEQ ID NO: 1683 - RNA, 18 nt, synthetic construct
  misc_feature 1..18: note = Targeting Domain
  source 1..18: mol_type = other RNA
ccattgccggtggtcagc

SEQ ID NO: 1684 - RNA, 19 nt, synthetic construct
  misc_feature 1..19: note = Targeting Domain
  source 1..19: mol_type = other RNA
gccattgccggtggtcagc

SEQ ID NO: 1685 - RNA, 20 nt, synthetic construct
  misc_feature 1..20: note = Targeting Domain
  source 1..20: mol_type = other RNA
ggccattgccggtggtcagc

SEQ ID NO: 1686 - RNA, 21 nt, synthetic construct
  misc_feature 1..21: note = Targeting Domain
  source 1..21: mol_type = other RNA
aggccattgccggtggtcagc

SEQ ID NO: 1687 - RNA, 22 nt, synthetic construct
  misc_feature 1..22: note = Targeting Domain
  source 1..22: mol_type = other RNA
caggccattgccggtggtcagc

SEQ ID NO: 1688 - RNA, 23 nt, synthetic construct
  misc_feature 1..23: note = Targeting Domain
  source 1..23: mol_type = other RNA
acaggccattgccggtggtcagc

SEQ ID NO: 1689 - RNA, 24 nt, synthetic construct
  misc_feature 1..24: note = Targeting Domain
  source 1..24: mol_type = other RNA
aacaggccattgccggtggtcagc

SEQ ID NO: 1690 - RNA, 18 nt, synthetic construct
  misc_feature 1..18: note = Targeting Domain
  source 1..18: mol_type = other RNA
gagggtacggaggagttc

SEQ ID NO: 1691 - RNA, 19 nt, synthetic construct
  misc_feature 1..19: note = Targeting Domain
  source 1..19: mol_type = other RNA
tgagggtacggaggagttc

SEQ ID NO: 1692 - RNA, 20 nt, synthetic construct
  misc_feature 1..20: note = Targeting Domain
  source 1..20: mol_type = other RNA
ttgagggtacggaggagttc

SEQ ID NO: 1693 - RNA, 21 nt, synthetic construct
  misc_feature 1..21: note = Targeting Domain
  source 1..21: mol_type = other RNA
gttgagggtacggaggagttc

SEQ ID NO: 1694 - RNA, 22 nt, synthetic construct
  misc_feature 1..22: note = Targeting Domain
  source 1..22: mol_type = other RNA
ggttgagggtacggaggagttc

SEQ ID NO: 1695 - RNA, 23 nt, synthetic construct
  misc_feature 1..23: note = Targeting Domain
  source 1..23: mol_type = other RNA
tggttgagggtacggaggagttc

SEQ ID NO: 1696 - RNA, 24 nt, synthetic construct
  misc_feature 1..24: note = Targeting Domain
  source 1..24: mol_type = other RNA
ctggttgagggtacggaggagttc

SEQ ID NO: 1697 - RNA, 18 nt, synthetic construct
  misc_feature 1..18: note = Targeting Domain
  source 1..18: mol_type = other RNA
tggcggtataggctgaag

SEQ ID NO: 1698 - RNA, 19 nt, synthetic construct
  misc_feature 1..19: note = Targeting Domain
  source 1..19: mol_type = other RNA
ctggcggtataggctgaag

SEQ ID NO: 1699 - RNA, 20 nt, synthetic construct
  misc_feature 1..20: note = Targeting Domain
  source 1..20: mol_type = other RNA
gctggcggtataggctgaag

SEQ ID NO: 1700 - RNA, 21 nt, synthetic construct
  misc_feature 1..21: note = Targeting Domain
  source 1..21: mol_type = other RNA
agctggcggtataggctgaag

SEQ ID NO: 1701 - RNA, 22 nt, synthetic construct
  misc_feature 1..22: note = Targeting Domain
  source 1..22: mol_type = other RNA
cagctggcggtataggctgaag

SEQ ID NO: 1702 - RNA, 23 nt, synthetic construct
  misc_feature 1..23: note = Targeting Domain
  source 1..23: mol_type = other RNA
ccagctggcggtataggctgaag

SEQ ID NO: 1703 - RNA, 24 nt, synthetic construct
  misc_feature 1..24: note = Targeting Domain
  source 1..24: mol_type = other RNA
gccagctggcggtataggctgaag

SEQ ID NO: 1704 - RNA, 18 nt, synthetic construct
  misc_feature 1..18: note = Targeting Domain
  source 1..18: mol_type = other RNA
gcagcacaggcctgccag

SEQ ID NO: 1705 - RNA, 19 nt, synthetic construct
  misc_feature 1..19: note = Targeting Domain
  source 1..19: mol_type = other RNA
ggcagcacaggcctgccag

SEQ ID NO: 1706 - RNA, 20 nt, synthetic construct
  misc_feature 1..20: note = Targeting Domain
  source 1..20: mol_type = other RNA
aggcagcacaggcctgccag

SEQ ID NO: 1707 - RNA, 21 nt, synthetic construct
  misc_feature 1..21: note = Targeting Domain
  source 1..21: mol_type = other RNA
caggcagcacaggcctgccag

SEQ ID NO: 1708 - RNA, 22 nt, synthetic construct
  misc_feature 1..22: note = Targeting Domain
  source 1..22: mol_type = other RNA
ccaggcagcacaggcctgccag

SEQ ID NO: 1709 - RNA, 23 nt, synthetic construct
  misc_feature 1..23: note = Targeting Domain
  source 1..23: mol_type = other RNA
accaggcagcacaggcctgccag

SEQ ID NO: 1710 - RNA, 24 nt, synthetic construct
  misc_feature 1..24: note = Targeting Domain
  source 1..24: mol_type = other RNA
gaccaggcagcacaggcctgccag

SEQ ID NO: 1711 - RNA, 18 nt, synthetic construct
  misc_feature 1..18: note = Targeting Domain
  source 1..18: mol_type = other RNA
gccattgccggtggtcag

SEQ ID NO: 1712 - RNA, 19 nt, synthetic construct
  misc_feature 1..19: note = Targeting Domain
  source 1..19: mol_type = other RNA
ggccattgccggtggtcag

SEQ ID NO: 1713 - RNA, 20 nt, synthetic construct
  misc_feature 1..20: note = Targeting Domain
  source 1..20: mol_type = other RNA
aggccattgccggtggtcag

SEQ ID NO: 1714 - RNA, 21 nt, synthetic construct
  misc_feature 1..21: note = Targeting Domain
  source 1..21: mol_type = other RNA
caggccattgccggtggtcag

SEQ ID NO: 1715 - RNA, 22 nt, synthetic construct
  misc_feature 1..22: note = Targeting Domain
  source 1..22: mol_type = other RNA
acaggccattgccggtggtcag

SEQ ID NO: 1716 - RNA, 23 nt, synthetic construct
  misc_feature 1..23: note = Targeting Domain
  source 1..23: mol_type = other RNA
aacaggccattgccggtggtcag

SEQ ID NO: 1717 - RNA, 24 nt, synthetic construct
  misc_feature 1..24: note = Targeting Domain
  source 1..24: mol_type = other RNA
gaacaggccattgccggtggtcag

SEQ ID NO: 1718 - RNA, 18 nt, synthetic construct
  misc_feature 1..18: note = Targeting Domain
  source 1..18: mol_type = other RNA
ttgtcctgcaagacagag

SEQ ID NO: 1719 - RNA, 19 nt, synthetic construct
  misc_feature 1..19: note = Targeting Domain
  source 1..19: mol_type = other RNA
attgtcctgcaagacagag

SEQ ID NO: 1720 - RNA, 20 nt, synthetic construct
  misc_feature 1..20: note = Targeting Domain
  source 1..20: mol_type = other RNA
cattgtcctgcaagacagag

SEQ ID NO: 1721 - RNA, 21 nt, synthetic construct
  misc_feature 1..21: note = Targeting Domain
  source 1..21: mol_type = other RNA
gcattgtcctgcaagacagag

SEQ ID NO: 1722 - RNA, 22 nt, synthetic construct
  misc_feature 1..22: note = Targeting Domain
  source 1..22: mol_type = other RNA
ggcattgtcctgcaagacagag

SEQ ID NO: 1723 - RNA, 23 nt, synthetic construct
  misc_feature 1..23: note = Targeting Domain
  source 1..23: mol_type = other RNA
cggcattgtcctgcaagacagag

SEQ ID NO: 1724 - RNA, 24 nt, synthetic construct
  misc_feature 1..24: note = Targeting Domain
  source 1..24: mol_type = other RNA
acggcattgtcctgcaagacagag

SEQ ID NO: 1725 - RNA, 18 nt, synthetic construct
  misc_feature 1..18: note = Targeting Domain
  source 1..18: mol_type = other RNA
gcgatgctcactggggag

SEQ ID NO: 1726 - RNA, 19 nt, synthetic construct
  misc_feature 1..19: note = Targeting Domain
  source 1..19: mol_type = other RNA
agcgatgctcactggggag

SEQ ID NO: 1727 - RNA, 20 nt, synthetic construct
  misc_feature 1..20: note = Targeting Domain
  source 1..20: mol_type = other RNA
tagcgatgctcactggggag

SEQ ID NO: 1728 - RNA, 21 nt, synthetic construct
  misc_feature 1..21: note = Targeting Domain
  source 1..21: mol_type = other RNA
gtagcgatgctcactggggag

SEQ ID NO: 1729 - RNA, 22 nt, synthetic construct
  misc_feature 1..22: note = Targeting Domain
  source 1..22: mol_type = other RNA
tgtagcgatgctcactggggag

SEQ ID NO: 1730 - RNA, 23 nt, synthetic construct
  misc_feature 1..23: note = Targeting Domain
  source 1..23: mol_type = other RNA
ctgtagcgatgctcactggggag

SEQ ID NO: 1731 - RNA, 24 nt, synthetic construct
  misc_feature 1..24: note = Targeting Domain
  source 1..24: mol_type = other RNA
gctgtagcgatgctcactggggag

SEQ ID NO: 1732 - RNA, 18 nt, synthetic construct
  misc_feature 1..18: note = Targeting Domain
  source 1..18: mol_type = other RNA
tggctggttgagggtacg

SEQ ID NO: 1733 - RNA, 19 nt, synthetic construct
  misc_feature 1..19: note = Targeting Domain
  source 1..19: mol_type = other RNA
ctggctggttgagggtacg

SEQ ID NO: 1734 - RNA, 20 nt, synthetic construct
  misc_feature 1..20: note = Targeting Domain
  source 1..20: mol_type = other RNA
tctggctggttgagggtacg

SEQ ID NO: 1735 - RNA, 21 nt, synthetic construct
  misc_feature 1..21: note = Targeting Domain
  source 1..21: mol_type = other RNA
gtctggctggttgagggtacg

SEQ ID NO: 1736 - RNA, 22 nt, synthetic construct
  misc_feature 1..22: note = Targeting Domain
  source 1..22: mol_type = other RNA
tgtctggctggttgagggtacg

SEQ ID NO: 1737 - RNA, 23 nt, synthetic construct
  misc_feature 1..23: note = Targeting Domain
  source 1..23: mol_type = other RNA
ctgtctggctggttgagggtacg

SEQ ID NO: 1738 - RNA, 24 nt, synthetic construct
  misc_feature 1..24: note = Targeting Domain
  source 1..24: mol_type = other RNA
gctgtctggctggttgagggtacg

SEQ ID NO: 1739 - RNA, 18 nt, synthetic construct
  misc_feature 1..18: note = Targeting Domain
  source 1..18: mol_type = other RNA
actagcttcaggccctcg

SEQ ID NO: 1740 - RNA, 19 nt, synthetic construct
  misc_feature 1..19: note = Targeting Domain
  source 1..19: mol_type = other RNA
cactagcttcaggccctcg

SEQ ID NO: 1741 - RNA, 20 nt, synthetic construct
  misc_feature 1..20: note = Targeting Domain
  source 1..20: mol_type = other RNA
ccactagcttcaggccctcg

SEQ ID NO: 1742 - RNA, 21 nt, synthetic construct
  misc_feature 1..21: note = Targeting Domain
  source 1..21: mol_type = other RNA
tccactagcttcaggccctcg

SEQ ID NO: 1743 - RNA, 22 nt, synthetic construct
  misc_feature 1..22: note = Targeting Domain
  source 1..22: mol_type = other RNA
atccactagcttcaggccctcg

SEQ ID NO: 1744 - RNA, 23 nt, synthetic construct
  misc_feature 1..23: note = Targeting Domain
  source 1..23: mol_type = other RNA
tatccactagcttcaggccctcg

SEQ ID NO: 1745 - RNA, 24 nt, synthetic construct
  misc_feature 1..24: note = Targeting Domain
  source 1..24: mol_type = other RNA
ttatccactagcttcaggccctcg

SEQ ID NO: 1746 - RNA, 18 nt, synthetic construct
  misc_feature 1..18: note = Targeting Domain
  source 1..18: mol_type = other RNA
tcagccttggtccccagg

SEQ ID NO: 1747 - RNA, 19 nt, synthetic construct
  misc_feature 1..19: note = Targeting Domain
  source 1..19: mol_type = other RNA
gtcagccttggtccccagg

SEQ ID NO: 1748 - RNA, 20 nt, synthetic construct
  misc_feature 1..20: note = Targeting Domain
  source 1..20: mol_type = other RNA
tgtcagccttggtccccagg

SEQ ID NO: 1749 - RNA, 21 nt, synthetic construct
  misc_feature 1..21: note = Targeting Domain
  source 1..21: mol_type = other RNA
gtgtcagccttggtccccagg

SEQ ID NO: 1750 - RNA, 22 nt, synthetic construct
  misc_feature 1..22: note = Targeting Domain
  source 1..22: mol_type = other RNA
agtgtcagccttggtccccagg

SEQ ID NO: 1751 - RNA, 23 nt, synthetic construct
  misc_feature 1..23: note = Targeting Domain
  source 1..23: mol_type = other RNA
gagtgtcagccttggtccccagg

SEQ ID NO: 1752 - RNA, 24 nt, synthetic construct
  misc_feature 1..24: note = Targeting Domain
  source 1..24: mol_type = other RNA
tgagtgtcagccttggtccccagg

SEQ ID NO: 1753 - RNA, 18 nt, synthetic construct
  misc_feature 1..18: note = Targeting Domain
  source 1..18: mol_type = other RNA
aaggcgaactcagccagg

SEQ ID NO: 1754 - RNA, 19 nt, synthetic construct
  misc_feature 1..19: note = Targeting Domain
  source 1..19: mol_type = other RNA
gaaggcgaactcagccagg

SEQ ID NO: 1755 - RNA, 20 nt, synthetic construct
  misc_feature 1..20: note = Targeting Domain
  source 1..20: mol_type = other RNA
tgaaggcgaactcagccagg

SEQ ID NO: 1756 - RNA, 21 nt, synthetic construct
  misc_feature 1..21: note = Targeting Domain
  source 1..21: mol_type = other RNA
ctgaaggcgaactcagccagg

SEQ ID NO: 1757 - RNA, 22 nt, synthetic construct
  misc_feature 1..22: note = Targeting Domain
  source 1..22: mol_type = other RNA
gctgaaggcgaactcagccagg

SEQ ID NO: 1758 - RNA, 23 nt, synthetic construct
  misc_feature 1..23: note = Targeting Domain
  source 1..23: mol_type = other RNA
ggctgaaggcgaactcagccagg

SEQ ID NO: 1759 - RNA, 24 nt, synthetic construct
  misc_feature 1..24: note = Targeting Domain
  source 1..24: mol_type = other RNA
aggctgaaggcgaactcagccagg

SEQ ID NO: 1760 - RNA, 18 nt, synthetic construct
  misc_feature 1..18: note = Targeting Domain
  source 1..18: mol_type = other RNA
tccggaatctccgtgagg

SEQ ID NO: 1761 - RNA, 19 nt, synthetic construct
  misc_feature 1..19: note = Targeting Domain
  source 1..19: mol_type = other RNA
ctccggaatctccgtgagg

SEQ ID NO: 1762 - RNA, 20 nt, synthetic construct
  misc_feature 1..20: note = Targeting Domain
  source 1..20: mol_type = other RNA
cctccggaatctccgtgagg

SEQ ID NO: 1763 - RNA, 21 nt, synthetic construct
  misc_feature 1..21: note = Targeting Domain
  source 1..21: mol_type = other RNA
gcctccggaatctccgtgagg

SEQ ID NO: 1764 - RNA, 22 nt, synthetic construct
  misc_feature 1..22: note = Targeting Domain
  source 1..22: mol_type = other RNA
agcctccggaatctccgtgagg

SEQ ID NO: 1765 - RNA, 23 nt, synthetic construct
  misc_feature 1..23: note = Targeting Domain
  source 1..23: mol_type = other RNA
gagcctccggaatctccgtgagg

SEQ ID NO: 1766 - RNA, 24 nt, synthetic construct
  misc_feature 1..24: note = Targeting Domain
  source 1..24: mol_type = other RNA
tgagcctccggaatctccgtgagg

SEQ ID NO: 1767 - RNA, 18 nt, synthetic construct
  misc_feature 1..18: note = Targeting Domain
  source 1..18: mol_type = other RNA
gccagctggcggtatagg

SEQ ID NO: 1768 - RNA, 19 nt, synthetic construct
  misc_feature 1..19: note = Targeting Domain
  source 1..19: mol_type = other RNA
tgccagctggcggtatagg

SEQ ID NO: 1769 - RNA, 20 nt, synthetic construct
  misc_feature 1..20: note = Targeting Domain
  source 1..20: mol_type = other RNA
gtgccagctggcggtatagg

SEQ ID NO: 1770 - RNA, 21 nt, synthetic construct
  misc_feature 1..21: note = Targeting Domain
  source 1..21: mol_type = other RNA
tgtgccagctggcggtatagg

SEQ ID NO: 1771 - RNA, 22 nt, synthetic construct
  misc_feature 1..22: note = Targeting Domain
  source 1..22: mol_type = other RNA
gtgtgccagctggcggtatagg

SEQ ID NO: 1772 - RNA, 23 nt, synthetic construct
  misc_feature 1..23: note = Targeting Domain
  source 1..23: mol_type = other RNA
ggtgtgccagctggcggtatagg

SEQ ID NO: 1773 - RNA, 24 nt, synthetic construct
  misc_feature 1..24: note = Targeting Domain
  source 1..24: mol_type = other RNA
tggtgtgccagctggcggtatagg

SEQ ID NO: 1774 - RNA, 18 nt, synthetic construct
  misc_feature 1..18: note = Targeting Domain
  source 1..18: mol_type = other RNA
gtagcgatgctcactggg

SEQ ID NO: 1775 - RNA, 19 nt, synthetic construct
  misc_feature 1..19: note = Targeting Domain
  source 1..19: mol_type = other RNA
tgtagcgatgctcactggg

SEQ ID NO: 1776 - RNA, 20 nt, synthetic construct
  misc_feature 1..20: note = Targeting Domain
  source 1..20: mol_type = other RNA
ctgtagcgatgctcactggg

SEQ ID NO: 1777 - RNA, 21 nt, synthetic construct
  misc_feature 1..21: note = Targeting Domain
  source 1..21: mol_type = other RNA
gctgtagcgatgctcactggg

SEQ ID NO: 1778 - RNA, 22 nt, synthetic construct
  misc_feature 1..22: note = Targeting Domain
  source 1..22: mol_type = other RNA
ggctgtagcgatgctcactggg

SEQ ID NO: 1779 - RNA, 23 nt, synthetic construct
  misc_feature 1..23: note = Targeting Domain
  source 1..23: mol_type = other RNA
aggctgtagcgatgctcactggg

SEQ ID NO: 1780 - RNA, 24 nt, synthetic construct
  misc_feature 1..24: note = Targeting Domain
  source 1..24: mol_type = other RNA
aaggctgtagcgatgctcactggg

SEQ ID NO: 1781 - RNA, 18 nt, synthetic construct
  misc_feature 1..18: note = Targeting Domain
  source 1..18: mol_type = other RNA
cctgcaagacagagatgg

SEQ ID NO: 1782 - RNA, 19 nt, synthetic construct
  misc_feature 1..19: note = Targeting Domain
  source 1..19: mol_type = other RNA
tcctgcaagacagagatgg

SEQ ID NO: 1783 - RNA, 20 nt, synthetic construct
  misc_feature 1..20: note = Targeting Domain
  source 1..20: mol_type = other RNA
gtcctgcaagacagagatgg

SEQ ID NO: 1784 - RNA, 21 nt, synthetic construct
  misc_feature 1..21: note = Targeting Domain
  source 1..21: mol_type = other RNA
tgtcctgcaagacagagatgg

SEQ ID NO: 1785 - RNA, 22 nt, synthetic construct
  misc_feature 1..22: note = Targeting Domain
  source 1..22: mol_type = other RNA
ttgtcctgcaagacagagatgg

SEQ ID NO: 1786 - RNA, 23 nt, synthetic construct
  misc_feature 1..23: note = Targeting Domain
  source 1..23: mol_type = other RNA
attgtcctgcaagacagagatgg

SEQ ID NO: 1787 - RNA, 24 nt, synthetic construct
  misc_feature 1..24: note = Targeting Domain
  source 1..24: mol_type = other RNA
cattgtcctgcaagacagagatgg

SEQ ID NO: 1788 - RNA, 18 nt, synthetic construct
  misc_feature 1..18: note = Targeting Domain
  source 1..18: mol_type = other RNA
agctggctgtctggctgg

SEQ ID NO: 1789 - RNA, 19 nt, synthetic construct
  misc_feature 1..19: note = Targeting Domain
  source 1..19: mol_type = other RNA
gagctggctgtctggctgg

SEQ ID NO: 1790 - RNA, 20 nt, synthetic construct
  misc_feature 1..20: note = Targeting Domain
  source 1..20: mol_type = other RNA
ggagctggctgtctggctgg

SEQ ID NO: 1791 - RNA, 21 nt, synthetic construct
  misc_feature 1..21: note = Targeting Domain
  source 1..21: mol_type = other RNA
tggagctggctgtctggctgg

SEQ ID NO: 1792 - RNA, 22 nt, synthetic construct
  misc_feature 1..22: note = Targeting Domain
  source 1..22: mol_type = other RNA
ctggagctggctgtctggctgg

SEQ ID NO: 1793 - RNA, 23 nt, synthetic construct
  misc_feature 1..23: note = Targeting Domain
  source 1..23: mol_type = other RNA
gctggagctggctgtctggctgg

SEQ ID NO: 1794 - RNA, 24 nt, synthetic construct
  misc_feature 1..24: note = Targeting Domain
  source 1..24: mol_type = other RNA
agctggagctggctgtctggctgg

SEQ ID NO: 1795 - RNA, 18 nt, synthetic construct
  misc_feature 1..18: note = Targeting Domain
  source 1..18: mol_type = other RNA
tgggtgatcctgatcatg

SEQ ID NO: 1796 - RNA, 19 nt, synthetic construct
  misc_feature 1..19: note = Targeting Domain
  source 1..19: mol_type = other RNA
ttgggtgatcctgatcatg

SEQ ID NO: 1797 - RNA, 20 nt, synthetic construct
  misc_feature 1..20: note = Targeting Domain
  source 1..20: mol_type = other RNA
gttgggtgatcctgatcatg

SEQ ID NO: 1798 - RNA, 21 nt, synthetic construct
  misc_feature 1..21: note = Targeting Domain
  source 1..21: mol_type = other RNA
ggttgggtgatcctgatcatg

SEQ ID NO: 1799 - RNA, 22 nt, synthetic construct
  misc_feature 1..22: note = Targeting Domain
  source 1..22: mol_type = other RNA
aggttgggtgatcctgatcatg

SEQ ID NO: 1800 - RNA, 23 nt, synthetic construct
  misc_feature 1..23: note = Targeting Domain
  source 1..23: mol_type = other RNA
aaggttgggtgatcctgatcatg

SEQ ID NO: 1801 - RNA, 24 nt, synthetic construct
  misc_feature 1..24: note = Targeting Domain
  source 1..24: mol_type = other RNA
gaaggttgggtgatcctgatcatg

SEQ ID NO: 1802 - RNA, 18 nt, synthetic construct
  misc_feature 1..18: note = Targeting Domain
  source 1..18: mol_type = other RNA
tcctgcaagacagagatg

SEQ ID NO: 1803 - RNA, 19 nt, synthetic construct
  misc_feature 1..19: note = Targeting Domain
  source 1..19: mol_type = other RNA
gtcctgcaagacagagatg

SEQ ID NO: 1804 - RNA, 21 nt, synthetic construct
  misc_feature 1..21: note = Targeting Domain
  source 1..21: mol_type = other RNA
ttgtcctgcaagacagagatg

SEQ ID NO: 1805 - RNA, 22 nt, synthetic construct
  misc_feature 1..22: note = Targeting Domain
  source 1..22: mol_type = other RNA
attgtcctgcaagacagagatg

SEQ ID NO: 1806 - RNA, 23 nt, synthetic construct
  misc_feature 1..23: note = Targeting Domain
  source 1..23: mol_type = other RNA
cattgtcctgcaagacagagatg

SEQ ID NO: 1807 - RNA, 24 nt, synthetic construct
  misc_feature 1..24: note = Targeting Domain
  source 1..24: mol_type = other RNA
gcattgtcctgcaagacagagatg

SEQ ID NO: 1808 - RNA, 18 nt, synthetic construct
  misc_feature 1..18: note = Targeting Domain
  source 1..18: mol_type = other RNA
ctgtagcgatgctcactg

SEQ ID NO: 1809 - RNA, 19 nt, synthetic construct
  misc_feature 1..19: note = Targeting Domain
  source 1..19: mol_type = other RNA
gctgtagcgatgctcactg

SEQ ID NO: 1810 - RNA, 21 nt, synthetic construct
  misc_feature 1..21: note = Targeting Domain
  source 1..21: mol_type = other RNA
aggctgtagcgatgctcactg

SEQ ID NO: 1811 - RNA, 22 nt, synthetic construct
  misc_feature 1..22: note = Targeting Domain
  source 1..22: mol_type = other RNA
aaggctgtagcgatgctcactg

SEQ ID NO: 1812 - RNA, 23 nt, synthetic construct
  misc_feature 1..23: note = Targeting Domain
  source 1..23: mol_type = other RNA
aaaggctgtagcgatgctcactg

SEQ ID NO: 1813 - RNA, 24 nt, synthetic construct
  misc_feature 1..24: note = Targeting Domain
  source 1..24: mol_type = other RNA
caaaggctgtagcgatgctcactg

SEQ ID NO: 1814 - RNA, 18 nt, synthetic construct
  misc_feature 1..18: note = Targeting Domain
  source 1..18: mol_type = other RNA
agcttcaggccctcgctg

SEQ ID NO: 1815 - RNA, 19 nt, synthetic construct
  misc_feature 1..19: note = Targeting Domain
  source 1..19: mol_type = other RNA
tagcttcaggccctcgctg

SEQ ID NO: 1816 - RNA, 21 nt, synthetic construct
  misc_feature 1..21: note = Targeting Domain
  source 1..21: mol_type = other RNA
actagcttcaggccctcgctg

SEQ ID NO: 1817 - RNA, 22 nt, synthetic construct
  misc_feature 1..22: note = Targeting Domain
  source 1..22: mol_type = other RNA
cactagcttcaggccctcgctg

SEQ ID NO: 1818 - RNA, 23 nt, synthetic construct
  misc_feature 1..23: note = Targeting Domain
  source 1..23: mol_type = other RNA
ccactagcttcaggccctcgctg

SEQ ID NO: 1819 - RNA, 24 nt, synthetic construct
  misc_feature 1..24: note = Targeting Domain
  source 1..24: mol_type = other RNA
tccactagcttcaggccctcgctg

SEQ ID NO: 1820 - RNA, 18 nt, synthetic construct
  misc_feature 1..18: note = Targeting Domain
  source 1..18: mol_type = other RNA
aagaagatattggtgctg

SEQ ID NO: 1821 - RNA, 19 nt, synthetic construct
  misc_feature 1..19: note = Targeting Domain
  source 1..19: mol_type = other RNA
gaagaagatattggtgctg

SEQ ID NO: 1822 - RNA, 20 nt, synthetic construct
  misc_feature 1..20: note = Targeting Domain
  source 1..20: mol_type = other RNA
agaagaagatattggtgctg

SEQ ID NO: 1823 - RNA, 21 nt, synthetic construct
  misc_feature 1..21: note = Targeting Domain
  source 1..21: mol_type = other RNA
gagaagaagatattggtgctg

SEQ ID NO: 1824 - RNA, 22 nt, synthetic construct
  misc_feature 1..22: note = Targeting Domain
  source 1..22: mol_type = other RNA
ggagaagaagatattggtgctg

SEQ ID NO: 1825 - RNA, 23 nt, synthetic construct
  misc_feature 1..23: note = Targeting Domain
  source 1..23: mol_type = other RNA
gggagaagaagatattggtgctg

SEQ ID NO: 1826 - RNA, 24 nt, synthetic construct
  misc_feature 1..24: note = Targeting Domain
  source 1..24: mol_type = other RNA
ggggagaagaagatattggtgctg

SEQ ID NO: 1827 - RNA, 18 nt, synthetic construct
  misc_feature 1..18: note = Targeting Domain
  source 1..18: mol_type = other RNA
aggttgggggtgatcttg

SEQ ID NO: 1828 - RNA, 19 nt, synthetic construct
  misc_feature 1..19: note = Targeting Domain
  source 1..19: mol_type = other RNA
caggttgggggtgatcttg

SEQ ID NO: 1829 - RNA, 20 nt, synthetic construct
  misc_feature 1..20: note = Targeting Domain
  source 1..20: mol_type = other RNA
ccaggttgggggtgatcttg

SEQ ID NO: 1830 - RNA, 21 nt, synthetic construct
  misc_feature 1..21: note = Targeting Domain
  source 1..21: mol_type = other RNA
gccaggttgggggtgatcttg

SEQ ID NO: 1831 - RNA, 22 nt, synthetic construct
  misc_feature 1..22: note = Targeting Domain
  source 1..22: mol_type = other RNA
agccaggttgggggtgatcttg

SEQ ID NO: 1832 - RNA, 23 nt, synthetic construct
  misc_feature 1..23: note = Targeting Domain
  source 1..23: mol_type = other RNA
cagccaggttgggggtgatcttg

SEQ ID NO: 1833 - RNA, 24 nt, synthetic construct
  misc_feature 1..24: note = Targeting Domain
  source 1..24: mol_type = other RNA
tcagccaggttgggggtgatcttg

SEQ ID NO: 1834 - RNA, 18 nt, synthetic construct
  misc_feature 1..18: note = Targeting Domain
  source 1..18: mol_type = other RNA
gtcctgcaagacagagat

SEQ ID NO: 1835 - RNA, 19 nt, synthetic construct
  misc_feature 1..19: note = Targeting Domain
  source 1..19: mol_type = other RNA
tgtcctgcaagacagagat

SEQ ID NO: 1836 - RNA, 21 nt, synthetic construct
  misc_feature 1..21: note = Targeting Domain
  source 1..21: mol_type = other RNA
attgtcctgcaagacagagat

SEQ ID NO: 1837 - RNA, 22 nt, synthetic construct
  misc_feature 1..22: note = Targeting Domain
  source 1..22: mol_type = other RNA
cattgtcctgcaagacagagat

SEQ ID NO: 1838 - RNA, 23 nt, synthetic construct
  misc_feature 1..23: note = Targeting Domain
  source 1..23: mol_type = other RNA
gcattgtcctgcaagacagagat

SEQ ID NO: 1839 - RNA, 24 nt, synthetic construct
  misc_feature 1..24: note = Targeting Domain
  source 1..24: mol_type = other RNA
ggcattgtcctgcaagacagagat

SEQ ID NO: 1840 - RNA, 18 nt, synthetic construct
  misc_feature 1..18: note = Targeting Domain
  source 1..18: mol_type = other RNA
ctggaagccttcatggat

SEQ ID NO: 1841 - RNA, 19 nt, synthetic construct
  misc_feature 1..19: note = Targeting Domain
  source 1..19: mol_type = other RNA
cctggaagccttcatggat

SEQ ID NO: 1842 - RNA, 20 nt, synthetic construct
  misc_feature 1..20: note = Targeting Domain
  source 1..20: mol_type = other RNA
tcctggaagccttcatggat

SEQ ID NO: 1843 - RNA, 21 nt, synthetic construct
  misc_feature 1..21: note = Targeting Domain
  source 1..21: mol_type = other RNA
ttcctggaagccttcatggat

SEQ ID NO: 1844 - RNA, 22 nt, synthetic construct
  misc_feature 1..22: note = Targeting Domain
  source 1..22: mol_type = other RNA
gttcctggaagccttcatggat

SEQ ID NO: 1845 - RNA, 23 nt, synthetic construct
  misc_feature 1..23: note = Targeting Domain
  source 1..23: mol_type = other RNA
agttcctggaagccttcatggat

SEQ ID NO: 1846 - RNA, 24 nt, synthetic construct
  misc_feature 1..24: note = Targeting Domain
  source 1..24: mol_type = other RNA
gagttcctggaagccttcatggat

SEQ ID NO: 1847 - RNA, 18 nt, synthetic construct
  misc_feature 1..18: note = Targeting Domain
  source 1..18: mol_type = other RNA
gctgtagcgatgctcact

SEQ ID NO: 1848 - RNA, 19 nt, synthetic construct
  misc_feature 1..19: note = Targeting Domain
  source 1..19: mol_type = other RNA
ggctgtagcgatgctcact

SEQ ID NO: 1849 - RNA, 21 nt, synthetic construct
  misc_feature 1..21: note = Targeting Domain
  source 1..21: mol_type = other RNA
aaggctgtagcgatgctcact

SEQ ID NO: 1850 - RNA, 22 nt, synthetic construct
  misc_feature 1..22: note = Targeting Domain
  source 1..22: mol_type = other RNA
aaaggctgtagcgatgctcact

SEQ ID NO: 1851 - RNA, 23 nt, synthetic construct
  misc_feature 1..23: note = Targeting Domain
  source 1..23: mol_type = other RNA
caaaggctgtagcgatgctcact

SEQ ID NO: 1852 - RNA, 24 nt, synthetic construct
  misc_feature 1..24: note = Targeting Domain
  source 1..24: mol_type = other RNA
gcaaaggctgtagcgatgctcact

SEQ ID NO: 1853 - RNA, 18 nt, synthetic construct
  misc_feature 1..18: note = Targeting Domain
  source 1..18: mol_type = other RNA
cttcatggatctgagcct

SEQ ID NO: 1854 - RNA, 19 nt, synthetic construct
  misc_feature 1..19: note = Targeting Domain
  source 1..19: mol_type = other RNA
ccttcatggatctgagcct

SEQ ID NO: 1855 - RNA, 20 nt, synthetic construct
  misc_feature 1..20: note = Targeting Domain
  source 1..20: mol_type = other RNA
gccttcatggatctgagcct

SEQ ID NO: 1856 - RNA, 21 nt, synthetic construct
  misc_feature 1..21: note = Targeting Domain
  source 1..21: mol_type = other RNA
agccttcatggatctgagcct

SEQ ID NO: 1857 - RNA, 22 nt, synthetic construct
  misc_feature 1..22: note = Targeting Domain
  source 1..22: mol_type = other RNA
aagccttcatggatctgagcct

SEQ ID NO: 1858 - RNA, 23 nt, synthetic construct
  misc_feature 1..23: note = Targeting Domain
  source 1..23: mol_type = other RNA
gaagccttcatggatctgagcct

SEQ ID NO: 1859 - RNA, 24 nt, synthetic construct
  misc_feature 1..24: note = Targeting Domain
  source 1..24: mol_type = other RNA
ggaagccttcatggatctgagcct

SEQ ID NO: 1860 - RNA, 18 nt, synthetic construct
  misc_feature 1..18: note = Targeting Domain
  source 1..18: mol_type = other RNA
tagcttcaggccctcgct

SEQ ID NO: 1861 - RNA, 19 nt, synthetic construct
  misc_feature 1..19: note = Targeting Domain
  source 1..19: mol_type = other RNA
ctagcttcaggccctcgct

SEQ ID NO: 1862 - RNA, 20 nt, synthetic construct
  misc_feature 1..20: note = Targeting Domain
  source 1..20: mol_type = other RNA
actagcttcaggccctcgct

SEQ ID NO: 1863 - RNA, 21 nt, synthetic construct
  misc_feature 1..21: note = Targeting Domain
  source 1..21: mol_type = other RNA
cactagcttcaggccctcgct

SEQ ID NO: 1864 - RNA, 22 nt, synthetic construct
  misc_feature 1..22: note = Targeting Domain
  source 1..22: mol_type = other RNA
ccactagcttcaggccctcgct

SEQ ID NO: 1865 - RNA, 23 nt, synthetic construct
  misc_feature 1..23: note = Targeting Domain
  source 1..23: mol_type = other RNA
tccactagcttcaggccctcgct

SEQ ID NO: 1866 - RNA, 24 nt, synthetic construct
  misc_feature 1..24: note = Targeting Domain
  source 1..24: mol_type = other RNA
atccactagcttcaggccctcgct

SEQ ID NO: 1867 - RNA, 18 nt, synthetic construct
  misc_feature 1..18: note = Targeting Domain
  source 1..18: mol_type = other RNA
aggcgaactcagccaggt

SEQ ID NO: 1868 - RNA, 19 nt, synthetic construct
  misc_feature 1..19: note = Targeting Domain
  source 1..19: mol_type = other RNA
aaggcgaactcagccaggt

SEQ ID NO: 1869 - RNA, 21 nt, synthetic construct
  misc_feature 1..21: note = Targeting Domain
  source 1..21: mol_type = other RNA
tgaaggcgaactcagccaggt

SEQ ID NO: 1870 - RNA, 22 nt, synthetic construct
  misc_feature 1..22: note = Targeting Domain
  source 1..22: mol_type = other RNA
ctgaaggcgaactcagccaggt

SEQ ID NO: 1871 - RNA, 23 nt, synthetic construct
  misc_feature 1..23: note = Targeting Domain
  source 1..23: mol_type = other RNA
gctgaaggcgaactcagccaggt

SEQ ID NO: 1872 - RNA, 24 nt, synthetic construct
  misc_feature 1..24: note = Targeting Domain
  source 1..24: mol_type = other RNA
ggctgaaggcgaactcagccaggt

SEQ ID NO: 1873 - RNA, 18 nt, synthetic construct
  misc_feature 1..18: note = Targeting Domain
  source 1..18: mol_type = other RNA
gtctggctggttgagggt

SEQ ID NO: 1874 - RNA, 19 nt, synthetic construct
  misc_feature 1..19: note = Targeting Domain
  source 1..19: mol_type = other RNA
tgtctggctggttgagggt

SEQ ID NO: 1875 - RNA, 20 nt, synthetic construct
  misc_feature 1..20: note = Targeting Domain
  source 1..20: mol_type = other RNA
ctgtctggctggttgagggt

SEQ ID NO: 1876 - RNA, 21 nt, synthetic construct
  misc_feature 1..21: note = Targeting Domain
  source 1..21: mol_type = other RNA
gctgtctggctggttgagggt

SEQ ID NO: 1877 - RNA, 22 nt, synthetic construct
  misc_feature 1..22: note = Targeting Domain
  source 1..22: mol_type = other RNA
ggctgtctggctggttgagggt

SEQ ID NO: 1878 - RNA, 23 nt, synthetic construct
  misc_feature 1..23: note = Targeting Domain
  source 1..23: mol_type = other RNA
tggctgtctggctggttgagggt

SEQ ID NO: 1879 - RNA, 24 nt, synthetic construct
  misc_feature 1..24: note = Targeting Domain
  source 1..24: mol_type = other RNA
ctggctgtctggctggttgagggt

SEQ ID NO: 1880 - RNA, 18 nt, synthetic construct
  misc_feature 1..18: note = Targeting Domain
  source 1..18: mol_type = other RNA
gtgggatgtatctgtctt

SEQ ID NO: 1881 - RNA, 19 nt, synthetic construct
  misc_feature 1..19: note = Targeting Domain
  source 1..19: mol_type = other RNA
ggtgggatgtatctgtctt

SEQ ID NO: 1882 - RNA, 20 nt, synthetic construct
  misc_feature 1..20: note = Targeting Domain
  source 1..20: mol_type = other RNA
tggtgggatgtatctgtctt

SEQ ID NO: 1883 - RNA, 21 nt, synthetic construct
  misc_feature 1..21: note = Targeting Domain
  source 1..21: mol_type = other RNA
atggtgggatgtatctgtctt

SEQ ID NO: 1884 - RNA, 22 nt, synthetic construct
  misc_feature 1..22: note = Targeting Domain
  source 1..22: mol_type = other RNA
catggtgggatgtatctgtctt

SEQ ID NO: 1885 - RNA, 23 nt, synthetic construct
  misc_feature 1..23: note = Targeting Domain
  source 1..23: mol_type = other RNA
tcatggtgggatgtatctgtctt

SEQ ID NO: 1886 - RNA, 24 nt, synthetic construct
  misc_feature 1..24: note = Targeting Domain
  source 1..24: mol_type = other RNA
atcatggtgggatgtatctgtctt

SEQ ID NO: 1887 - RNA, 18 nt, synthetic construct
  misc_feature 1..18: note = Targeting Domain
  source 1..18: mol_type = other RNA
gtggagaagggtactcaa

SEQ ID NO: 1888 - RNA, 19 nt, synthetic construct
  misc_feature 1..19: note = Targeting Domain
  source 1..19: mol_type = other RNA
cgtggagaagggtactcaa

SEQ ID NO: 1889 - RNA, 21 nt, synthetic construct
  misc_feature 1..21: note = Targeting Domain
  source 1..21: mol_type = other RNA
tacgtggagaagggtactcaa

SEQ ID NO: 1890 - RNA, 22 nt, synthetic construct
  misc_feature 1..22: note = Targeting Domain
  source 1..22: mol_type = other RNA
ttacgtggagaagggtactcaa

SEQ ID NO: 1891 - RNA, 23 nt, synthetic construct
  misc_feature 1..23: note = Targeting Domain
  source 1..23: mol_type = other RNA
attacgtggagaagggtactcaa

SEQ ID NO: 1892 - RNA, 24 nt, synthetic construct
  misc_feature 1..24: note = Targeting Domain
  source 1..24: mol_type = other RNA
gattacgtggagaagggtactcaa

SEQ ID NO: 1893 - RNA, 18 nt, synthetic construct
  misc_feature 1..18: note = Targeting Domain
  source 1..18: mol_type = other RNA
ctgtcaacttcggggaca

SEQ ID NO: 1894 - RNA, 19 nt, synthetic construct
  misc_feature 1..19: note = Targeting Domain
  source 1..19: mol_type = other RNA
actgtcaacttcggggaca

SEQ ID NO: 1895 - RNA, 20 nt, synthetic construct
  misc_feature 1..20: note = Targeting Domain
  source 1..20: mol_type = other RNA
cactgtcaacttcggggaca

SEQ ID NO: 1896 - RNA, 21 nt, synthetic construct
  misc_feature 1..21: note = Targeting Domain
  source 1..21: mol_type = other RNA
tcactgtcaacttcggggaca

SEQ ID NO: 1897 - RNA, 22 nt, synthetic construct
  misc_feature 1..22: note = Targeting Domain
  source 1..22: mol_type = other RNA
ttcactgtcaacttcggggaca

SEQ ID NO: 1898 - RNA, 23 nt, synthetic construct
  misc_feature 1..23: note = Targeting Domain
  source 1..23: mol_type = other RNA
cttcactgtcaacttcggggaca

SEQ ID NO: 1899 - RNA, 24 nt, synthetic construct
  misc_feature 1..24: note = Targeting Domain
  source 1..24: mol_type = other RNA
ccttcactgtcaacttcggggaca

SEQ ID NO: 1900 - RNA, 18 nt, synthetic construct
  misc_feature 1..18: note = Targeting Domain
  source 1..18: mol_type = other RNA
cctggctgaggatcccca

SEQ ID NO: 1901 - RNA, 19 nt, synthetic construct
  misc_feature 1..19: note = Targeting Domain
  source 1..19: mol_type = other RNA
ccctggctgaggatcccca

SEQ ID NO: 1902 - RNA, 21 nt, synthetic construct
  misc_feature 1..21: note = Targeting Domain
  source 1..21: mol_type = other RNA
ctccctggctgaggatcccca

SEQ ID NO: 1903 - RNA, 22 nt, synthetic construct
  misc_feature 1..22: note = Targeting Domain
  source 1..22: mol_type = other RNA
tctccctggctgaggatcccca

SEQ ID NO: 1904 - RNA, 23 nt, synthetic construct
  misc_feature 1..23: note = Targeting Domain
  source 1..23: mol_type = other RNA
gtctccctggctgaggatcccca

SEQ ID NO: 1905 - RNA, 24 nt, synthetic construct
  misc_feature 1..24: note = Targeting Domain
  source 1..24: mol_type = other RNA
tgtctccctggctgaggatcccca

SEQ ID NO: 1906 - RNA, 18 nt, synthetic construct
  misc_feature 1..18: note = Targeting Domain
  source 1..18: mol_type = other RNA
aatatcttcttctcccca

SEQ ID NO: 1907 - RNA, 19 nt, synthetic construct
  misc_feature 1..19: note = Targeting Domain
  source 1..19: mol_type = other RNA
caatatcttcttctcccca

SEQ ID NO: 1908 - RNA, 20 nt, synthetic construct
  misc_feature 1..20: note = Targeting Domain
  source 1..20: mol_type = other RNA
ccaatatcttcttctcccca

SEQ ID NO: 1909 - RNA, 21 nt, synthetic construct
  misc_feature 1..21: note = Targeting Domain
  source 1..21: mol_type = other RNA
accaatatcttcttctcccca

SEQ ID NO: 1910 - RNA, 22 nt, synthetic construct
  misc_feature 1..22: note = Targeting Domain
  source 1..22: mol_type = other RNA
caccaatatcttcttctcccca

SEQ ID NO: 1911 - RNA, 23 nt, synthetic construct
  misc_feature 1..23: note = Targeting Domain
  source 1..23: mol_type = other RNA
gcaccaatatcttcttctcccca

SEQ ID NO: 1912 - RNA, 24 nt, synthetic construct
  misc_feature 1..24: note = Targeting Domain
  source 1..24: mol_type = other RNA
agcaccaatatcttcttctcccca

SEQ ID NO: 1913 - RNA, 18 nt, synthetic construct
  misc_feature 1..18: note = Targeting Domain
  source 1..18: mol_type = other RNA
cgtggagaagggtactca

SEQ ID NO: 1914 - RNA, 19 nt, synthetic construct
  misc_feature 1..19: note = Targeting Domain
  source 1..19: mol_type = other RNA
acgtggagaagggtactca

SEQ ID NO: 1915 - RNA, 21 nt, synthetic construct
  misc_feature 1..21: note = Targeting Domain
  source 1..21: mol_type = other RNA
ttacgtggagaagggtactca

SEQ ID NO: 1916 - RNA, 22 nt, synthetic construct
  misc_feature 1..22: note = Targeting Domain
  source 1..22: mol_type = other RNA
attacgtggagaagggtactca

SEQ ID NO: 1917 - RNA, 23 nt, synthetic construct
  misc_feature 1..23: note = Targeting Domain
  source 1..23: mol_type = other RNA
gattacgtggagaagggtactca

SEQ ID NO: 1918 - RNA, 24 nt, synthetic construct
  misc_feature 1..24: note = Targeting Domain
  source 1..24: mol_type = other RNA
cgattacgtggagaagggtactca

SEQ ID NO: 1919 - RNA, 18 nt, synthetic construct
  misc_feature 1..18: note = Targeting Domain
  source 1..18: mol_type = other RNA
gcctgaatttcaacctca

SEQ ID NO: 1920 - RNA, 19 nt, synthetic construct
  misc_feature 1..19: note = Targeting Domain
  source 1..19: mol_type = other RNA
ggcctgaatttcaacctca

SEQ ID NO: 1921 - RNA, 20 nt, synthetic construct
  misc_feature 1..20: note = Targeting Domain
  source 1..20: mol_type = other RNA
gggcctgaatttcaacctca

SEQ ID NO: 1922 - RNA, 21 nt, synthetic construct
  misc_feature 1..21: note = Targeting Domain
  source 1..21: mol_type = other RNA
agggcctgaatttcaacctca

SEQ ID NO: 1923 - RNA, 22 nt, synthetic construct
  misc_feature 1..22: note = Targeting Domain
  source 1..22: mol_type = other RNA
gagggcctgaatttcaacctca

SEQ ID NO: 1924 - RNA, 23 nt, synthetic construct
  misc_feature 1..23: note = Targeting Domain
  source 1..23: mol_type = other RNA
ggagggcctgaatttcaacctca

SEQ ID NO: 1925 - RNA, 24 nt, synthetic construct
  misc_feature 1..24: note = Targeting Domain
  source 1..24: mol_type = other RNA
tggagggcctgaatttcaacctca

SEQ ID NO: 1926 - RNA, 18 nt, synthetic construct
  misc_feature 1..18: note = Targeting Domain
  source 1..18: mol_type = other RNA
gcaatggcctgttcctca

SEQ ID NO: 1927 - RNA, 19 nt, synthetic construct
  misc_feature 1..19: note = Targeting Domain
  source 1..19: mol_type = other RNA
ggcaatggcctgttcctca

SEQ ID NO: 1928 - RNA, 20 nt, synthetic construct
  misc_feature 1..20: note = Targeting Domain
  source 1..20: mol_type = other RNA
cggcaatggcctgttcctca

SEQ ID NO: 1929 - RNA, 21 nt, synthetic construct
  misc_feature 1..21: note = Targeting Domain
  source 1..21: mol_type = other RNA
ccggcaatggcctgttcctca

SEQ ID NO: 1930 - RNA, 22 nt, synthetic construct
  misc_feature 1..22: note = Targeting Domain
  source 1..22: mol_type = other RNA
accggcaatggcctgttcctca

SEQ ID NO: 1931 - RNA, 23 nt, synthetic construct
  misc_feature 1..23: note = Targeting Domain
  source 1..23: mol_type = other RNA
caccggcaatggcctgttcctca

SEQ ID NO: 1932 - RNA, 24 nt, synthetic construct
  misc_feature 1..24: note = Targeting Domain
  source 1..24: mol_type = other RNA
ccaccggcaatggcctgttcctca

SEQ ID NO: 1933 - RNA, 18 nt, synthetic construct
  misc_feature 1..18: note = Targeting Domain
  source 1..18: mol_type = other RNA
aaattgtggatttggtca

SEQ ID NO: 1934 - RNA, 19 nt, synthetic construct
  misc_feature 1..19: note = Targeting Domain
  source 1..19: mol_type = other RNA
aaaattgtggatttggtca

SEQ ID NO: 1935 - RNA, 20 nt, synthetic construct
  misc_feature 1..20: note = Targeting Domain
  source 1..20: mol_type = other RNA
gaaaattgtggatttggtca

SEQ ID NO: 1936 - RNA, 21 nt, synthetic construct
  misc_feature 1..21: note = Targeting Domain
  source 1..21: mol_type = other RNA
ggaaaattgtggatttggtca

SEQ ID NO: 1937 - RNA, 22 nt, synthetic construct
  misc_feature 1..22: note = Targeting Domain
  source 1..22: mol_type = other RNA
gggaaaattgtggatttggtca

SEQ ID NO: 1938 - RNA, 23 nt, synthetic construct
  misc_feature 1..23: note = Targeting Domain
  source 1..23: mol_type = other RNA
agggaaaattgtggatttggtca

SEQ ID NO: 1939 - RNA, 24 nt, synthetic construct
  misc_feature 1..24: note = Targeting Domain
  source 1..24: mol_type = other RNA
aagggaaaattgtggatttggtca

SEQ ID NO: 1940 - RNA, 18 nt, synthetic construct
  misc_feature 1..18: note = Targeting Domain
  source 1..18: mol_type = other RNA
tttggtcaaggagcttga

SEQ ID NO: 1941 - RNA, 19 nt, synthetic construct
  misc_feature 1..19: note = Targeting Domain
  source 1..19: mol_type = other RNA
atttggtcaaggagcttga

SEQ ID NO: 1942 - RNA, 20 nt, synthetic construct
  misc_feature 1..20: note = Targeting Domain
  source 1..20: mol_type = other RNA
gatttggtcaaggagcttga

SEQ ID NO: 1943 - RNA, 21 nt, synthetic construct
  misc_feature 1..21: note = Targeting Domain
  source 1..21: mol_type = other RNA
ggatttggtcaaggagcttga

SEQ ID NO: 1944 - RNA, 22 nt, synthetic construct
  misc_feature 1..22: note = Targeting Domain
  source 1..22: mol_type = other RNA
tggatttggtcaaggagcttga

SEQ ID NO: 1945 - RNA, 23 nt, synthetic construct
  misc_feature 1..23: note = Targeting Domain
  source 1..23: mol_type = other RNA
gtggatttggtcaaggagcttga

SEQ ID NO: 1946 - RNA, 24 nt, synthetic construct
  misc_feature 1..24: note = Targeting Domain
  source 1..24: mol_type = other RNA
tgtggatttggtcaaggagcttga

SEQ ID NO: 1947 - RNA, 18 nt, synthetic construct
  misc_feature 1..18: note = Targeting Domain
  source 1..18: mol_type = other RNA
aaacagatcaacgattac

SEQ ID NO: 1948 - RNA, 19 nt, synthetic construct
  misc_feature 1..19: note = Targeting Domain
  source 1..19: mol_type = other RNA
gaaacagatcaacgattac

SEQ ID NO: 1949 - RNA, 20 nt, synthetic construct
  misc_feature 1..20: note = Targeting Domain
  source 1..20: mol_type = other RNA
agaaacagatcaacgattac

SEQ ID NO: 1950 - RNA, 21 nt, synthetic construct
  misc_feature 1..21: note = Targeting Domain
  source 1..21: mol_type = other RNA
aagaaacagatcaacgattac

SEQ ID NO: 1951 - RNA, 22 nt, synthetic construct
  misc_feature 1..22: note = Targeting Domain
  source 1..22: mol_type = other RNA
caagaaacagatcaacgattac

SEQ ID NO: 1952 - RNA, 23 nt, synthetic construct
  misc_feature 1..23: note = Targeting Domain
  source 1..23: mol_type = other RNA
ccaagaaacagatcaacgattac

SEQ ID NO: 1953 - RNA, 24 nt, synthetic construct
  misc_feature 1..24: note = Targeting Domain
  source 1..24: mol_type = other RNA
gccaagaaacagatcaacgattac

SEQ ID NO: 1954 - RNA, 18 nt, synthetic construct
  misc_feature 1..18: note = Targeting Domain
  source 1..18: mol_type = other RNA
ccctggctgaggatcccc

SEQ ID NO: 1955 - RNA, 19 nt, synthetic construct
  misc_feature 1..19: note = Targeting Domain
  source 1..19: mol_type = other RNA
tccctggctgaggatcccc

SEQ ID NO: 1956 - RNA, 21 nt, synthetic construct
  misc_feature 1..21: note = Targeting Domain
  source 1..21: mol_type = other RNA
tctccctggctgaggatcccc

SEQ ID NO: 1957 - RNA, 22 nt, synthetic construct
  misc_feature 1..22: note = Targeting Domain
  source 1..22: mol_type = other RNA
gtctccctggctgaggatcccc

SEQ ID NO: 1958 - RNA, 23 nt, synthetic construct
  misc_feature 1..23: note = Targeting Domain
  source 1..23: mol_type = other RNA
tgtctccctggctgaggatcccc

SEQ ID NO: 1959 - RNA, 24 nt, synthetic construct
  misc_feature 1..24: note = Targeting Domain
  source 1..24: mol_type = other RNA
ctgtctccctggctgaggatcccc

SEQ ID NO: 1960 - RNA, 18 nt, synthetic construct
  misc_feature 1..18: note = Targeting Domain
  source 1..18: mol_type = other RNA
tccctggctgaggatccc

SEQ ID NO: 1961 - RNA, 19 nt, synthetic construct
  misc_feature 1..19: note = Targeting Domain
  source 1..19: mol_type = other RNA
ctccctggctgaggatccc

SEQ ID NO: 1962 - RNA, 20 nt, synthetic construct
  misc_feature 1..20: note = Targeting Domain
  source 1..20: mol_type = other RNA
tctccctggctgaggatccc

SEQ ID NO: 1963 - RNA, 21 nt, synthetic construct
  misc_feature 1..21: note = Targeting Domain
  source 1..21: mol_type = other RNA
gtctccctggctgaggatccc

SEQ ID NO: 1964 - RNA, 22 nt, synthetic construct
  misc_feature 1..22: note = Targeting Domain
  source 1..22: mol_type = other RNA
tgtctccctggctgaggatccc

SEQ ID NO: 1965 - RNA, 23 nt, synthetic construct
  misc_feature 1..23: note = Targeting Domain
  source 1..23: mol_type = other RNA
ctgtctccctggctgaggatccc

SEQ ID NO: 1966 - RNA, 24 nt, synthetic construct
  misc_feature 1..24: note = Targeting Domain
  source 1..24: mol_type = other RNA
cctgtctccctggctgaggatccc

SEQ ID NO: 1967 - RNA, 18 nt, synthetic construct
  misc_feature 1..18: note = Targeting Domain
  source 1..18: mol_type = other RNA
cctttgcaatgctctccc

SEQ ID NO: 1968 - RNA, 19 nt, synthetic construct
  misc_feature 1..19: note = Targeting Domain
  source 1..19: mol_type = other RNA
gcctttgcaatgctctccc

SEQ ID NO: 1969 - RNA, 21 nt, synthetic construct
  misc_feature 1..21: note = Targeting Domain
  source 1..21: mol_type = other RNA
cagcctttgcaatgctctccc

SEQ ID NO: 1970 - RNA, 22 nt, synthetic construct
  misc_feature 1..22: note = Targeting Domain
  source 1..22: mol_type = other RNA
acagcctttgcaatgctctccc

SEQ ID NO: 1971 - RNA, 23 nt, synthetic construct
  misc_feature 1..23: note = Targeting Domain
  source 1..23: mol_type = other RNA
tacagcctttgcaatgctctccc

SEQ ID NO: 1972 - RNA, 24 nt, synthetic construct
  misc_feature 1..24: note = Targeting Domain
  source 1..24: mol_type = other RNA
ctacagcctttgcaatgctctccc

SEQ ID NO: 1973 - RNA, 18 nt, synthetic construct
  misc_feature 1..18: note = Targeting Domain
  source 1..18: mol_type = other RNA
ggggacaccgaagaggcc

SEQ ID NO: 1974 - RNA, 19 nt, synthetic construct
  misc_feature 1..19: note = Targeting Domain
  source 1..19: mol_type = other RNA
cggggacaccgaagaggcc

SEQ ID NO: 1975 - RNA, 20 nt, synthetic construct
  misc_feature 1..20: note = Targeting Domain
  source 1..20: mol_type = other RNA
tcggggacaccgaagaggcc

SEQ ID NO: 1976 - RNA, 21 nt, synthetic construct
  misc_feature 1..21: note = Targeting Domain
  source 1..21: mol_type = other RNA
ttcggggacaccgaagaggcc

SEQ ID NO: 1977 - RNA, 22 nt, synthetic construct
  misc_feature 1..22: note = Targeting Domain
  source 1..22: mol_type = other RNA
cttcggggacaccgaagaggcc

SEQ ID NO: 1978 - RNA, 23 nt, synthetic construct
  misc_feature 1..23: note = Targeting Domain
  source 1..23: mol_type = other RNA
acttcggggacaccgaagaggcc

SEQ ID NO: 1979 - RNA, 24 nt, synthetic construct
  misc_feature 1..24: note = Targeting Domain
  source 1..24: mol_type = other RNA
aacttcggggacaccgaagaggcc

SEQ ID NO: 1980 - RNA, 18 nt, synthetic construct
  misc_feature 1..18: note = Targeting Domain
  source 1..18: mol_type = other RNA
ccccagggagatgctgcc

SEQ ID NO: 1981 - RNA, 19 nt, synthetic construct
  misc_feature 1..19: note = Targeting Domain
  source 1..19: mol_type = other RNA
tccccagggagatgctgcc

SEQ ID NO: 1982 - RNA, 20 nt, synthetic construct
  misc_feature 1..20: note = Targeting Domain
  source 1..20: mol_type = other RNA
atccccagggagatgctgcc

SEQ ID NO: 1983 - RNA, 21 nt, synthetic construct
  misc_feature 1..21: note = Targeting Domain
  source 1..21: mol_type = other RNA
gatccccagggagatgctgcc

SEQ ID NO: 1984 - RNA, 22 nt, synthetic construct
  misc_feature 1..22: note = Targeting Domain
  source 1..22: mol_type = other RNA
ggatccccagggagatgctgcc

SEQ ID NO: 1985 - RNA, 23 nt, synthetic construct
  misc_feature 1..23: note = Targeting Domain
  source 1..23: mol_type = other RNA
aggatccccagggagatgctgcc

SEQ ID NO: 1986 - RNA, 24 nt, synthetic construct
  misc_feature 1..24: note = Targeting Domain
  source 1..24: mol_type = other RNA
gaggatccccagggagatgctgcc

SEQ ID NO: 1987 - RNA, 18 nt, synthetic construct
  misc_feature 1..18: note = Targeting Domain
  source 1..18: mol_type = other RNA
acactcacgatgaaatcc

SEQ ID NO: 1988 - RNA, 19 nt, synthetic construct
  misc_feature 1..19: note = Targeting Domain
  source 1..19: mol_type = other RNA
gacactcacgatgaaatcc

SEQ ID NO: 1989 - RNA, 21 nt, synthetic construct
  misc_feature 1..21: note = Targeting Domain
  source 1..21: mol_type = other RNA
ctgacactcacgatgaaatcc

SEQ ID NO: 1990 - RNA, 22 nt, synthetic construct
  misc_feature 1..22: note = Targeting Domain
  source 1..22: mol_type = other RNA
gctgacactcacgatgaaatcc

SEQ ID NO: 1991 - RNA, 23 nt, synthetic construct
  misc_feature 1..23: note = Targeting Domain
  source 1..23: mol_type = other RNA
ggctgacactcacgatgaaatcc

SEQ ID NO: 1992 - RNA, 24 nt, synthetic construct
  misc_feature 1..24: note = Targeting Domain
  source 1..24: mol_type = other RNA
aggctgacactcacgatgaaatcc

SEQ ID NO: 1993 - RNA, 18 nt, synthetic construct
  misc_feature 1..18: note = Targeting Domain
  source 1..18: mol_type = other RNA
ttccggaggctcagatcc

SEQ ID NO: 1994 - RNA, 19 nt, synthetic construct
  misc_feature 1..19: note = Targeting Domain
  source 1..19: mol_type = other RNA
attccggaggctcagatcc

SEQ ID NO: 1995 - RNA, 20 nt, synthetic construct
  misc_feature 1..20: note = Targeting Domain
  source 1..20: mol_type = other RNA
gattccggaggctcagatcc

SEQ ID NO: 1996 - RNA, 21 nt, synthetic construct
  misc_feature 1..21: note = Targeting Domain
  source 1..21: mol_type = other RNA
agattccggaggctcagatcc

SEQ ID NO: 1997 - RNA, 22 nt, synthetic construct
  misc_feature 1..22: note = Targeting Domain
  source 1..22: mol_type = other RNA
gagattccggaggctcagatcc

SEQ ID NO: 1998 - RNA, 23 nt, synthetic construct
  misc_feature 1..23: note = Targeting Domain
  source 1..23: mol_type = other RNA
ggagattccggaggctcagatcc

SEQ ID NO: 1999 - RNA, 24 nt, synthetic construct
  misc_feature 1..24: note = Targeting Domain
  source 1..24: mol_type = other RNA
cggagattccggaggctcagatcc

SEQ ID NO: 2000 - RNA, 18 nt, synthetic construct
  misc_feature 1..18: note = Targeting Domain
  source 1..18: mol_type = other RNA
gcctttgcaatgctctcc

SEQ ID NO: 2001 - RNA, 19 nt, synthetic construct
  misc_feature 1..19: note = Targeting Domain
  source 1..19: mol_type = other RNA
agcctttgcaatgctctcc

SEQ ID NO: 2002 - RNA, 20 nt, synthetic construct
  misc_feature 1..20: note = Targeting Domain
  source 1..20: mol_type = other RNA
cagcctttgcaatgctctcc

SEQ ID NO: 2003 - RNA, 21 nt, synthetic construct
  misc_feature 1..21: note = Targeting Domain
  source 1..21: mol_type = other RNA
acagcctttgcaatgctctcc

SEQ ID NO: 2004 - RNA, 22 nt, synthetic construct
  misc_feature 1..22: note = Targeting Domain
  source 1..22: mol_type = other RNA
tacagcctttgcaatgctctcc

SEQ ID NO: 2005 - RNA, 23 nt, synthetic construct
  misc_feature 1..23: note = Targeting Domain
  source 1..23: mol_type = other RNA
ctacagcctttgcaatgctctcc

SEQ ID NO: 2006 - RNA, 24 nt, synthetic construct
  misc_feature 1..24: note = Targeting Domain
  source 1..24: mol_type = other RNA
gctacagcctttgcaatgctctcc

SEQ ID NO: 2007 - RNA, 18 nt, synthetic construct
  misc_feature 1..18: note = Targeting Domain
  source 1..18: mol_type = other RNA
agatccatgaaggcttcc

SEQ ID NO: 2008 - RNA, 19 nt, synthetic construct
  misc_feature 1..19: note = Targeting Domain
  source 1..19: mol_type = other RNA
cagatccatgaaggcttcc

SEQ ID NO: 2009 - RNA, 21 nt, synthetic construct
  misc_feature 1..21: note = Targeting Domain
  source 1..21: mol_type = other RNA
ctcagatccatgaaggcttcc

SEQ ID NO: 2010 - RNA, 22 nt, synthetic construct
  misc_feature 1..22: note = Targeting Domain
  source 1..22: mol_type = other RNA
gctcagatccatgaaggcttcc

SEQ ID NO: 2011 - RNA, 23 nt, synthetic construct
  misc_feature 1..23: note = Targeting Domain
  source 1..23: mol_type = other RNA
ggctcagatccatgaaggcttcc

SEQ ID NO: 2012 - RNA, 24 nt, synthetic construct
  misc_feature 1..24: note = Targeting Domain
  source 1..24: mol_type = other RNA
aggctcagatccatgaaggcttcc

SEQ ID NO: 2013 - RNA, 18 nt, synthetic construct
  misc_feature 1..18: note = Targeting Domain
  source 1..18: mol_type = other RNA
taaggttgctcaaccagc

SEQ ID NO: 2014 - RNA, 19 nt, synthetic construct
  misc_feature 1..19: note = Targeting Domain
  source 1..19: mol_type = other RNA
gtaaggttgctcaaccagc

SEQ ID NO: 2015 - RNA, 20 nt, synthetic construct
  misc_feature 1..20: note = Targeting Domain
  source 1..20: mol_type = other RNA
ggtaaggttgctcaaccagc

SEQ ID NO: 2016 - RNA, 21 nt, synthetic construct
  misc_feature 1..21: note = Targeting Domain
  source 1..21: mol_type = other RNA
aggtaaggttgctcaaccagc

SEQ ID NO: 2017 - RNA, 22 nt, synthetic construct
  misc_feature 1..22: note = Targeting Domain
  source 1..22: mol_type = other RNA
aaggtaaggttgctcaaccagc

SEQ ID NO: 2018 - RNA, 23 nt, synthetic construct
  misc_feature 1..23: note = Targeting Domain
  source 1..23: mol_type = other RNA
aaaggtaaggttgctcaaccagc

SEQ ID NO: 2019 - RNA, 24 nt, synthetic construct
  misc_feature 1..24: note = Targeting Domain
  source 1..24: mol_type = other RNA
taaaggtaaggttgctcaaccagc

SEQ ID NO: 2020 - RNA, 18 nt, synthetic construct
  misc_feature 1..18: note = Targeting Domain
  source 1..18: mol_type = other RNA
aatggcctgttcctcagc

SEQ ID NO: 2021 - RNA, 19 nt, synthetic construct
  misc_feature 1..19: note = Targeting Domain
  source 1..19: mol_type = other RNA
caatggcctgttcctcagc

SEQ ID NO: 2022 - RNA, 20 nt, synthetic construct
  misc_feature 1..20: note = Targeting Domain
  source 1..20: mol_type = other RNA
gcaatggcctgttcctcagc

SEQ ID NO: 2023 - RNA, 21 nt, synthetic construct
  misc_feature 1..21: note = Targeting Domain
  source 1..21: mol_type = other RNA
ggcaatggcctgttcctcagc

SEQ ID NO: 2024 - RNA, 22 nt, synthetic construct
  misc_feature 1..22: note = Targeting Domain
  source 1..22: mol_type = other RNA
cggcaatggcctgttcctcagc

SEQ ID NO: 2025 - RNA, 23 nt, synthetic construct
  misc_feature 1..23: note = Targeting Domain
  source 1..23: mol_type = other RNA
ccggcaatggcctgttcctcagc

SEQ ID NO: 2026 - RNA, 24 nt, synthetic construct
  misc_feature 1..24: note = Targeting Domain
  source 1..24: mol_type = other RNA
accggcaatggcctgttcctcagc

SEQ ID NO: 2027 - RNA, 18 nt, synthetic construct
  misc_feature 1..18: note = Targeting Domain
  source 1..18: mol_type = other RNA
ctgttcctcagcgagggc

SEQ ID NO: 2028 - RNA, 19 nt, synthetic construct
  misc_feature 1..19: note = Targeting Domain
  source 1..19: mol_type = other RNA
cctgttcctcagcgagggc

SEQ ID NO: 2029 - RNA, 20 nt, synthetic construct
  misc_feature 1..20: note = Targeting Domain
  source 1..20: mol_type = other RNA
gcctgttcctcagcgagggc

SEQ ID NO: 2030 - RNA, 21 nt, synthetic construct
  misc_feature 1..21: note = Targeting Domain
  source 1..21: mol_type = other RNA
ggcctgttcctcagcgagggc

SEQ ID NO: 2031 - RNA, 22 nt, synthetic construct
  misc_feature 1..22: note = Targeting Domain
  source 1..22: mol_type = other RNA
tggcctgttcctcagcgagggc

SEQ ID NO: 2032 - RNA, 23 nt, synthetic construct
  misc_feature 1..23: note = Targeting Domain
  source 1..23: mol_type = other RNA
atggcctgttcctcagcgagggc

SEQ ID NO: 2033 - RNA, 24 nt, synthetic construct
  misc_feature 1..24: note = Targeting Domain
  source 1..24: mol_type = other RNA
aatggcctgttcctcagcgagggc

SEQ ID NO: 2034 - RNA, 18 nt, synthetic construct
  misc_feature 1..18: note = Targeting Domain
  source 1..18: mol_type = other RNA
gacactcacgatgaaatc

SEQ ID NO: 2035 - RNA, 19 nt, synthetic construct
  misc_feature 1..19: note = Targeting Domain
  source 1..19: mol_type = other RNA
tgacactcacgatgaaatc

SEQ ID NO: 2036 - RNA, 20 nt, synthetic construct
  misc_feature 1..20: note = Targeting Domain
  source 1..20: mol_type = other RNA
ctgacactcacgatgaaatc

SEQ ID NO: 2037 - RNA, 21 nt, synthetic construct
  misc_feature 1..21: note = Targeting Domain
  source 1..21: mol_type = other RNA
gctgacactcacgatgaaatc

SEQ ID NO: 2038 - RNA, 22 nt, synthetic construct
  misc_feature 1..22: note = Targeting Domain
  source 1..22: mol_type = other RNA
ggctgacactcacgatgaaatc

SEQ ID NO: 2039 - RNA, 23 nt, synthetic construct
  misc_feature 1..23: note = Targeting Domain
  source 1..23: mol_type = other RNA
aggctgacactcacgatgaaatc

SEQ ID NO: 2040 - RNA, 24 nt, synthetic construct
  misc_feature 1..24: note = Targeting Domain
  source 1..24: mol_type = other RNA
aaggctgacactcacgatgaaatc

SEQ ID NO: 2041 - RNA, 18 nt, synthetic construct
  misc_feature 1..18: note = Targeting Domain
  source 1..18: mol_type = other RNA
acgtggagaagggtactc

SEQ ID NO: 2042 - RNA, 19 nt, synthetic construct
  misc_feature 1..19: note = Targeting Domain
  source 1..19: mol_type = other RNA
tacgtggagaagggtactc

SEQ ID NO: 2043 - RNA, 20 nt, synthetic construct
  misc_feature 1..20: note = Targeting Domain
  source 1..20: mol_type = other RNA
ttacgtggagaagggtactc

SEQ ID NO: 2044 - RNA, 21 nt, synthetic construct
  misc_feature 1..21: note = Targeting Domain
  source 1..21: mol_type = other RNA
attacgtggagaagggtactc

SEQ ID NO: 2045 - RNA, 22 nt, synthetic construct
  misc_feature 1..22: note = Targeting Domain
  source 1..22: mol_type = other RNA
gattacgtggagaagggtactc

SEQ ID NO: 2046 - RNA, 23 nt, synthetic construct
  misc_feature 1..23: note = Targeting Domain
  source 1..23: mol_type = other RNA
cgattacgtggagaagggtactc

SEQ ID NO: 2047 - RNA, 24 nt, synthetic construct
  misc_feature 1..24: note = Targeting Domain
  source 1..24: mol_type = other RNA
acgattacgtggagaagggtactc

SEQ ID NO: 2048 - RNA, 18 nt, synthetic construct
  misc_feature 1..18: note = Targeting Domain
  source 1..18: mol_type = other RNA
ggcctgaatttcaacctc

SEQ ID NO: 2049 - RNA, 19 nt, synthetic construct
  misc_feature 1..19: note = Targeting Domain
  source 1..19: mol_type = other RNA
gggcctgaatttcaacctc

SEQ ID NO: 2050 - RNA, 20 nt, synthetic construct
  misc_feature 1..20: note = Targeting Domain
  source 1..20: mol_type = other RNA
agggcctgaatttcaacctc

SEQ ID NO: 2051 - RNA, 21 nt, synthetic construct
  misc_feature 1..21: note = Targeting Domain
  source 1..21: mol_type = other RNA
gagggcctgaatttcaacctc

SEQ ID NO: 2052 - RNA, 22 nt, synthetic construct
  misc_feature 1..22: note = Targeting Domain
  source 1..22: mol_type = other RNA
ggagggcctgaatttcaacctc

SEQ ID NO: 2053 - RNA, 23 nt, synthetic construct
  misc_feature 1..23: note = Targeting Domain
  source 1..23: mol_type = other RNA
tggagggcctgaatttcaacctc

SEQ ID NO: 2054 - RNA, 24 nt, synthetic construct
  misc_feature 1..24: note = Targeting Domain
  source 1..24: mol_type = other RNA
ctggagggcctgaatttcaacctc

SEQ ID NO: 2055 - RNA, 18 nt, synthetic construct
  misc_feature 1..18: note = Targeting Domain
  source 1..18: mol_type = other RNA
aatgccgtcttctgtctc

SEQ ID NO: 2056 - RNA, 19 nt, synthetic construct
  misc_feature 1..19: note = Targeting Domain
  source 1..19: mol_type = other RNA
caatgccgtcttctgtctc

SEQ ID NO: 2057 - RNA, 20 nt, synthetic construct
  misc_feature 1..20: note = Targeting Domain
  source 1..20: mol_type = other RNA
acaatgccgtcttctgtctc

SEQ ID NO: 2058 - RNA, 21 nt, synthetic construct
  misc_feature 1..21: note = Targeting Domain
  source 1..21: mol_type = other RNA
gacaatgccgtcttctgtctc

SEQ ID NO: 2059 - RNA, 22 nt, synthetic construct
  misc_feature 1..22: note = Targeting Domain
  source 1..22: mol_type = other RNA
ggacaatgccgtcttctgtctc

SEQ ID NO: 2060 - RNA, 23 nt, synthetic construct
  misc_feature 1..23: note = Targeting Domain
  source 1..23: mol_type = other RNA
aggacaatgccgtcttctgtctc

SEQ ID NO: 2061 - RNA, 24 nt, synthetic construct
  misc_feature 1..24: note = Targeting Domain
  source 1..24: mol_type = other RNA
caggacaatgccgtcttctgtctc

SEQ ID NO: 2062 - RNA, 18 nt, synthetic construct
  misc_feature 1..18: note = Targeting Domain
  source 1..18: mol_type = other RNA
aaaattgtggatttggtc

SEQ ID NO: 2063 - RNA, 19 nt, synthetic construct
  misc_feature 1..19: note = Targeting Domain
  source 1..19: mol_type = other RNA
gaaaattgtggatttggtc

SEQ ID NO: 2064 - RNA, 20 nt, synthetic construct
  misc_feature 1..20: note = Targeting Domain
  source 1..20: mol_type = other RNA
ggaaaattgtggatttggtc

SEQ ID NO: 2065 - RNA, 21 nt, synthetic construct
  misc_feature 1..21: note = Targeting Domain
  source 1..21: mol_type = other RNA
gggaaaattgtggatttggtc

SEQ ID NO: 2066 - RNA, 22 nt, synthetic construct
  misc_feature 1..22: note = Targeting Domain
  source 1..22: mol_type = other RNA
agggaaaattgtggatttggtc

SEQ ID NO: 2067 - RNA, 23 nt, synthetic construct
  misc_feature 1..23: note = Targeting Domain
  source 1..23: mol_type = other RNA
aagggaaaattgtggatttggtc

SEQ ID NO: 2068 - RNA, 24 nt, synthetic construct
  misc_feature 1..24: note = Targeting Domain
  source 1..24: mol_type = other RNA
caagggaaaattgtggatttggtc

SEQ ID NO: 2069 - RNA, 18 nt, synthetic construct
  misc_feature 1..18: note = Targeting Domain
  source 1..18: mol_type = other RNA
tcaacctcacggagattc

SEQ ID NO: 2070 - RNA, 19 nt, synthetic construct
  misc_feature 1..19: note = Targeting Domain
  source 1..19: mol_type = other RNA
ttcaacctcacggagattc

SEQ ID NO: 2071 - RNA, 21 nt, synthetic construct
  misc_feature 1..21: note = Targeting Domain
  source 1..21: mol_type = other RNA
atttcaacctcacggagattc

SEQ ID NO: 2072 - RNA, 22 nt, synthetic construct
  misc_feature 1..22: note = Targeting Domain
  source 1..22: mol_type = other RNA
aatttcaacctcacggagattc

SEQ ID NO: 2073 - RNA, 23 nt, synthetic construct
  misc_feature 1..23: note = Targeting Domain
  source 1..23: mol_type = other RNA
gaatttcaacctcacggagattc

SEQ ID NO: 2074 - RNA, 24 nt, synthetic construct
  misc_feature 1..24: note = Targeting Domain
  source 1..24: mol_type = other RNA
tgaatttcaacctcacggagattc

SEQ ID NO: 2075 - RNA, 18 nt, synthetic construct
  misc_feature 1..18: note = Targeting Domain
  source 1..18: mol_type = other RNA
gccttcactgtcaacttc

SEQ ID NO: 2076 - RNA, 19 nt, synthetic construct
  misc_feature 1..19: note = Targeting Domain
  source 1..19: mol_type = other RNA
agccttcactgtcaacttc

SEQ ID NO: 2077 - RNA, 21 nt, synthetic construct
  misc_feature 1..21: note = Targeting Domain
  source 1..21: mol_type = other RNA
gaagccttcactgtcaacttc

SEQ ID NO: 2078 - RNA, 22 nt, synthetic construct
  misc_feature 1..22: note = Targeting Domain
  source 1..22: mol_type = other RNA
agaagccttcactgtcaacttc

SEQ ID NO: 2079 - RNA, 23 nt, synthetic construct
  misc_feature 1..23: note = Targeting Domain
  source 1..23: mol_type = other RNA
cagaagccttcactgtcaacttc

SEQ ID NO: 2080 - RNA, 24 nt, synthetic construct
  misc_feature 1..24: note = Targeting Domain
  source 1..24: mol_type = other RNA
tcagaagccttcactgtcaacttc

SEQ ID NO: 2081 - RNA, 18 nt, synthetic construct
  misc_feature 1..18: note = Targeting Domain
  source 1..18: mol_type = other RNA
cagatccatgaaggcttc

SEQ ID NO: 2082 - RNA, 19 nt, synthetic construct
  misc_feature 1..19: note = Targeting Domain
  source 1..19: mol_type = other RNA
tcagatccatgaaggcttc

SEQ ID NO: 2083 - RNA, 20 nt, synthetic construct
  misc_feature 1..20: note = Targeting Domain
  source 1..20: mol_type = other RNA
ctcagatccatgaaggcttc

SEQ ID NO: 2084 - RNA, 21 nt, synthetic construct
  misc_feature 1..21: note = Targeting Domain
  source 1..21: mol_type = other RNA
gctcagatccatgaaggcttc

SEQ ID NO: 2085 - RNA, 22 nt, synthetic construct
  misc_feature 1..22: note = Targeting Domain
  source 1..22: mol_type = other RNA
ggctcagatccatgaaggcttc

SEQ ID NO: 2086 - RNA, 23 nt, synthetic construct
  misc_feature 1..23: note = Targeting Domain
  source 1..23: mol_type = other RNA
aggctcagatccatgaaggcttc

SEQ ID NO: 2087 - RNA, 24 nt, synthetic construct
  misc_feature 1..24: note = Targeting Domain
  source 1..24: mol_type = other RNA
gaggctcagatccatgaaggcttc

SEQ ID NO: 2088 - RNA, 18 nt, synthetic construct
  misc_feature 1..18: note = Targeting Domain
  source 1..18: mol_type = other RNA
ccaaggctgacactcacg

SEQ ID NO: 2089 - RNA, 19 nt, synthetic construct
  misc_feature 1..19: note = Targeting Domain
  source 1..19: mol_type = other RNA
accaaggctgacactcacg

SEQ ID NO: 2090 - RNA, 20 nt, synthetic construct
  misc_feature 1..20: note = Targeting Domain
  source 1..20: mol_type = other RNA
gaccaaggctgacactcacg

SEQ ID NO: 2091 - RNA, 21 nt, synthetic construct
  misc_feature 1..21: note = Targeting Domain
  source 1..21: mol_type = other RNA
ggaccaaggctgacactcacg

SEQ ID NO: 2092 - RNA, 22 nt, synthetic construct
  misc_feature 1..22: note = Targeting Domain
  source 1..22: mol_type = other RNA
gggaccaaggctgacactcacg

SEQ ID NO: 2093 - RNA, 23 nt, synthetic construct
  misc_feature 1..23: note = Targeting Domain
  source 1..23: mol_type = other RNA
ggggaccaaggctgacactcacg

SEQ ID NO: 2094 - RNA, 24 nt, synthetic construct
  misc_feature 1..24: note = Targeting Domain
  source 1..24: mol_type = other RNA
tggggaccaaggctgacactcacg

SEQ ID NO: 2095 - RNA, 18 nt, synthetic construct
  misc_feature 1..18: note = Targeting Domain
  source 1..18: mol_type = other RNA
aacagatcaacgattacg

SEQ ID NO: 2096 - RNA, 19 nt, synthetic construct
  misc_feature 1..19: note = Targeting Domain
  source 1..19: mol_type = other RNA
aaacagatcaacgattacg

SEQ ID NO: 2097 - RNA, 21 nt, synthetic construct
  misc_feature 1..21: note = Targeting Domain
  source 1..21: mol_type = other RNA
agaaacagatcaacgattacg

SEQ ID NO: 2098 - RNA, 22 nt, synthetic construct
  misc_feature 1..22: note = Targeting Domain
  source 1..22: mol_type = other RNA
aagaaacagatcaacgattacg

SEQ ID NO: 2099 - RNA, 23 nt, synthetic construct
  misc_feature 1..23: note = Targeting Domain
  source 1..23: mol_type = other RNA
caagaaacagatcaacgattacg

SEQ ID NO: 2100 - RNA, 24 nt, synthetic construct
  misc_feature 1..24: note = Targeting Domain
  source 1..24: mol_type = other RNA
ccaagaaacagatcaacgattacg

SEQ ID NO: 2101 - RNA, 18 nt, synthetic construct
  misc_feature 1..18: note = Targeting Domain
  source 1..18: mol_type = other RNA
tcaacttcggggacaccg

SEQ ID NO: 2102 - RNA, 19 nt, synthetic construct
  misc_feature 1..19: note = Targeting Domain
  source 1..19: mol_type = other RNA
gtcaacttcggggacaccg

SEQ ID NO: 2103 - RNA, 20 nt, synthetic construct
  misc_feature 1..20: note = Targeting Domain
  source 1..20: mol_type = other RNA
tgtcaacttcggggacaccg

SEQ ID NO: 2104 - RNA, 21 nt, synthetic construct
  misc_feature 1..21: note = Targeting Domain
  source 1..21: mol_type = other RNA
ctgtcaacttcggggacaccg

SEQ ID NO: 2105 - RNA, 22 nt, synthetic construct
  misc_feature 1..22: note = Targeting Domain
  source 1..22: mol_type = other RNA
actgtcaacttcggggacaccg

SEQ ID NO: 2106 - RNA, 23 nt, synthetic construct
  misc_feature 1..23: note = Targeting Domain
  source 1..23: mol_type = other RNA
cactgtcaacttcggggacaccg

SEQ ID NO: 2107 - RNA, 24 nt, synthetic construct
  misc_feature 1..24: note = Targeting Domain
  source 1..24: mol_type = other RNA
tcactgtcaacttcggggacaccg

SEQ ID NO: 2108 - RNA, 18 nt, synthetic construct
  misc_feature 1..18: note = Targeting Domain
  source 1..18: mol_type = other RNA
atgccgtcttctgtctcg

SEQ ID NO: 2109 - RNA, 19 nt, synthetic construct
  misc_feature 1..19: note = Targeting Domain
  source 1..19: mol_type = other RNA
aatgccgtcttctgtctcg

SEQ ID NO: 2110 - RNA, 21 nt, synthetic construct
  misc_feature 1..21: note = Targeting Domain
  source 1..21: mol_type = other RNA
acaatgccgtcttctgtctcg

SEQ ID NO: 2111 - RNA, 22 nt, synthetic construct
  misc_feature 1..22: note = Targeting Domain
  source 1..22: mol_type = other RNA
gacaatgccgtcttctgtctcg

SEQ ID NO: 2112 - RNA, 23 nt, synthetic construct
  misc_feature 1..23: note = Targeting Domain
  source 1..23: mol_type = other RNA
ggacaatgccgtcttctgtctcg

SEQ ID NO: 2113 - RNA, 24 nt, synthetic construct
  misc_feature 1..24: note = Targeting Domain
  source 1..24: mol_type = other RNA
aggacaatgccgtcttctgtctcg

SEQ ID NO: 2114 - RNA, 18 nt, synthetic construct
  misc_feature 1..18: note = Targeting Domain
  source 1..18: mol_type = other RNA
tggtccctgtctccctgg

SEQ ID NO: 2115 - RNA, 19 nt, synthetic construct
  misc_feature 1..19: note = Targeting Domain
  source 1..19: mol_type = other RNA
ctggtccctgtctccctgg

SEQ ID NO: 2116 - RNA, 20 nt, synthetic construct
  misc_feature 1..20: note = Targeting Domain
  source 1..20: mol_type = other RNA
cctggtccctgtctccctgg

SEQ ID NO: 2117 - RNA, 21 nt, synthetic construct
  misc_feature 1..21: note = Targeting Domain
  source 1..21: mol_type = other RNA
gcctggtccctgtctccctgg

SEQ ID NO: 2118 - RNA, 22 nt, synthetic construct
  misc_feature 1..22: note = Targeting Domain
  source 1..22: mol_type = other RNA
tgcctggtccctgtctccctgg

SEQ ID NO: 2119 - RNA, 23 nt, synthetic construct
  misc_feature 1..23: note = Targeting Domain
  source 1..23: mol_type = other RNA
ctgcctggtccctgtctccctgg

SEQ ID NO: 2120 - RNA, 24 nt, synthetic construct
  misc_feature 1..24: note = Targeting Domain
  source 1..24: mol_type = other RNA
gctgcctggtccctgtctccctgg

SEQ ID NO: 2121 - RNA, 18 nt, synthetic construct
  misc_feature 1..18: note = Targeting Domain
  source 1..18: mol_type = other RNA
actcacgatgaaatcctg

SEQ ID NO: 2122 - RNA, 19 nt, synthetic construct
  misc_feature 1..19: note = Targeting Domain
  source 1..19: mol_type = other RNA
cactcacgatgaaatcctg

SEQ ID NO: 2123 - RNA, 20 nt, synthetic construct
  misc_feature 1..20: note = Targeting Domain
  source 1..20: mol_type = other RNA
acactcacgatgaaatcctg

SEQ ID NO: 2124 - RNA, 21 nt, synthetic construct
  misc_feature 1..21: note = Targeting Domain
  source 1..21: mol_type = other RNA
gacactcacgatgaaatcctg

SEQ ID NO: 2125 - RNA, 22 nt, synthetic construct
  misc_feature 1..22: note = Targeting Domain
  source 1..22: mol_type = other RNA
tgacactcacgatgaaatcctg

SEQ ID NO: 2126 - RNA, 23 nt, synthetic construct
  misc_feature 1..23: note = Targeting Domain
  source 1..23: mol_type = other RNA
ctgacactcacgatgaaatcctg

SEQ ID NO: 2127 - RNA, 24 nt, synthetic construct
  misc_feature 1..24: note = Targeting Domain
  source 1..24: mol_type = other RNA
gctgacactcacgatgaaatcctg

SEQ ID NO: 2128 - RNA, 18 nt, synthetic construct
  misc_feature 1..18: note = Targeting Domain
  source 1..18: mol_type = other RNA
cagatcaacgattacgtg

SEQ ID NO: 2129 - RNA, 19 nt, synthetic construct
  misc_feature 1..19: note = Targeting Domain
  source 1..19: mol_type = other RNA
acagatcaacgattacgtg

SEQ ID NO: 2130 - RNA, 20 nt, synthetic construct
  misc_feature 1..20: note = Targeting Domain
  source 1..20: mol_type = other RNA
aacagatcaacgattacgtg

SEQ ID NO: 2131 - RNA, 21 nt, synthetic construct
  misc_feature 1..21: note = Targeting Domain
  source 1..21: mol_type = other RNA
aaacagatcaacgattacgtg

SEQ ID NO: 2132 - RNA, 22 nt, synthetic construct
  misc_feature 1..22: note = Targeting Domain
  source 1..22: mol_type = other RNA
gaaacagatcaacgattacgtg

SEQ ID NO: 2133 - RNA, 23 nt, synthetic construct
  misc_feature 1..23: note = Targeting Domain
  source 1..23: mol_type = other RNA
agaaacagatcaacgattacgtg

SEQ ID NO: 2134 - RNA, 24 nt, synthetic construct
  misc_feature 1..24: note = Targeting Domain
  source 1..24: mol_type = other RNA
aagaaacagatcaacgattacgtg

SEQ ID NO: 2135 - RNA, 18 nt, synthetic construct
  misc_feature 1..18: note = Targeting Domain
  source 1..18: mol_type = other RNA
ccccccatctctgtcttg

SEQ ID NO: 2136 - RNA, 19 nt, synthetic construct
  misc_feature 1..19: note = Targeting Domain
  source 1..19: mol_type = other RNA
cccccccatctctgtcttg

SEQ ID NO: 2137 - RNA, 20 nt, synthetic construct
  misc_feature 1..20: note = Targeting Domain
  source 1..20: mol_type = other RNA
gcccccccatctctgtcttg

SEQ ID NO: 2138 - RNA, 21 nt, synthetic construct
  misc_feature 1..21: note = Targeting Domain
  source 1..21: mol_type = other RNA
ggcccccccatctctgtcttg

SEQ ID NO: 2139 - RNA, 22 nt, synthetic construct
  misc_feature 1..22: note = Targeting Domain
  source 1..22: mol_type = other RNA
tggcccccccatctctgtcttg

SEQ ID NO: 2140 - RNA, 23 nt, synthetic construct
  misc_feature 1..23: note = Targeting Domain
  source 1..23: mol_type = other RNA
ctggcccccccatctctgtcttg

SEQ ID NO: 2141 - RNA, 24 nt, synthetic construct
  misc_feature 1..24: note = Targeting Domain
  source 1..24: mol_type = other RNA
cctggcccccccatctctgtcttg

SEQ ID NO: 2142 - RNA, 18 nt, synthetic construct
  misc_feature 1..18: note = Targeting Domain
  source 1..18: mol_type = other RNA
aagccttcactgtcaact

SEQ ID NO: 2143 - RNA, 19 nt, synthetic construct
  misc_feature 1..19: note = Targeting Domain
  source 1..19: mol_type = other RNA
gaagccttcactgtcaact

SEQ ID NO: 2144 - RNA, 20 nt, synthetic construct
  misc_feature 1..20: note = Targeting Domain
  source 1..20: mol_type = other RNA
agaagccttcactgtcaact

SEQ ID NO: 2145 - RNA, 21 nt, synthetic construct
  misc_feature 1..21: note = Targeting Domain
  source 1..21: mol_type = other RNA
cagaagccttcactgtcaact

SEQ ID NO: 2146 - RNA, 22 nt, synthetic construct
  misc_feature 1..22: note = Targeting Domain
  source 1..22: mol_type = other RNA
tcagaagccttcactgtcaact

SEQ ID NO: 2147 - RNA, 23 nt, synthetic construct
  misc_feature 1..23: note = Targeting Domain
  source 1..23: mol_type = other RNA
ctcagaagccttcactgtcaact

SEQ ID NO: 2148 - RNA, 24 nt, synthetic construct
  misc_feature 1..24: note = Targeting Domain
  source 1..24: mol_type = other RNA
actcagaagccttcactgtcaact

SEQ ID NO: 2149 - RNA, 18 nt, synthetic construct
  misc_feature 1..18: note = Targeting Domain
  source 1..18: mol_type = other RNA
ttaaaaagttgtaccact

SEQ ID NO: 2150 - RNA, 19 nt, synthetic construct
  misc_feature 1..19: note = Targeting Domain
  source 1..19: mol_type = other RNA
gttaaaaagttgtaccact

SEQ ID NO: 2151 - RNA, 20 nt, synthetic construct
  misc_feature 1..20: note = Targeting Domain
  source 1..20: mol_type = other RNA
tgttaaaaagttgtaccact

SEQ ID NO: 2152 - RNA, 21 nt, synthetic construct
  misc_feature 1..21: note = Targeting Domain
  source 1..21: mol_type = other RNA
atgttaaaaagttgtaccact

SEQ ID NO: 2153 - RNA, 22 nt, synthetic construct
  misc_feature 1..22: note = Targeting Domain
  source 1..22: mol_type = other RNA
gatgttaaaaagttgtaccact

SEQ ID NO: 2154 - RNA, 23 nt, synthetic construct
  misc_feature 1..23: note = Targeting Domain
  source 1..23: mol_type = other RNA
ggatgttaaaaagttgtaccact

SEQ ID NO: 2155 - RNA, 24 nt, synthetic construct
  misc_feature 1..24: note = Targeting Domain
  source 1..24: mol_type = other RNA
aggatgttaaaaagttgtaccact

SEQ ID NO: 2156 - RNA, 18 nt, synthetic construct
  misc_feature 1..18: note = Targeting Domain
  source 1..18: mol_type = other RNA
ctttgcaatgctctccct

SEQ ID NO: 2157 - RNA, 19 nt, synthetic construct
  misc_feature 1..19: note = Targeting Domain
  source 1..19: mol_type = other RNA
cctttgcaatgctctccct

SEQ ID NO: 2158 - RNA, 20 nt, synthetic construct
  misc_feature 1..20: note = Targeting Domain
  source 1..20: mol_type = other RNA
gcctttgcaatgctctccct

SEQ ID NO: 2159 - RNA, 21 nt, synthetic construct
  misc_feature 1..21: note = Targeting Domain
  source 1..21: mol_type = other RNA
agcctttgcaatgctctccct

SEQ ID NO: 2160 - RNA, 22 nt, synthetic construct
  misc_feature 1..22: note = Targeting Domain
  source 1..22: mol_type = other RNA
cagcctttgcaatgctctccct

SEQ ID NO: 2161 - RNA, 23 nt, synthetic construct
  misc_feature 1..23: note = Targeting Domain
  source 1..23: mol_type = other RNA
acagcctttgcaatgctctccct

SEQ ID NO: 2162 - RNA, 24 nt, synthetic construct
  misc_feature 1..24: note = Targeting Domain
  source 1..24: mol_type = other RNA
tacagcctttgcaatgctctccct

SEQ ID NO: 2163 - RNA, 18 nt, synthetic construct
  misc_feature 1..18: note = Targeting Domain
  source 1..18: mol_type = other RNA
ttcaacctcacggagatt

SEQ ID NO: 2164 - RNA, 19 nt, synthetic construct
  misc_feature 1..19: note = Targeting Domain
  source 1..19: mol_type = other RNA
tttcaacctcacggagatt

SEQ ID NO: 2165 - RNA, 20 nt, synthetic construct
  misc_feature 1..20: note = Targeting Domain
  source 1..20: mol_type = other RNA
atttcaacctcacggagatt

SEQ ID NO: 2166 - RNA, 21 nt, synthetic construct
  misc_feature 1..21: note = Targeting Domain
  source 1..21: mol_type = other RNA
aatttcaacctcacggagatt

SEQ ID NO: 2167 - RNA, 22 nt, synthetic construct
  misc_feature 1..22: note = Targeting Domain
  source 1..22: mol_type = other RNA
gaatttcaacctcacggagatt

SEQ ID NO: 2168 - RNA, 23 nt, synthetic construct
  misc_feature 1..23: note = Targeting Domain
  source 1..23: mol_type = other RNA
tgaatttcaacctcacggagatt

SEQ ID NO: 2169 - RNA, 24 nt, synthetic construct
  misc_feature 1..24: note = Targeting Domain
  source 1..24: mol_type = other RNA
ctgaatttcaacctcacggagatt

SEQ ID NO: 2170 - RNA, 18 nt, synthetic construct
  misc_feature 1..18: note = Targeting Domain
  source 1..18: mol_type = other RNA
agccttcactgtcaactt

SEQ ID NO: 2171 - RNA, 19 nt, synthetic construct
  misc_feature 1..19: note = Targeting Domain
  source 1..19: mol_type = other RNA
aagccttcactgtcaactt

SEQ ID NO: 2172 - RNA, 20 nt, synthetic construct
  misc_feature 1..20: note = Targeting Domain
  source 1..20: mol_type = other RNA
gaagccttcactgtcaactt

SEQ ID NO: 2173 - RNA, 21 nt, synthetic construct
  misc_feature 1..21: note = Targeting Domain
  source 1..21: mol_type = other RNA
agaagccttcactgtcaactt

SEQ ID NO: 2174 - RNA, 22 nt, synthetic construct
  misc_feature 1..22: note = Targeting Domain
  source 1..22: mol_type = other RNA
cagaagccttcactgtcaactt

SEQ ID NO: 2175 - RNA, 23 nt, synthetic construct
  misc_feature 1..23: note = Targeting Domain
  source 1..23: mol_type = other RNA
tcagaagccttcactgtcaactt

SEQ ID NO: 2176 - RNA, 24 nt, synthetic construct
  misc_feature 1..24: note = Targeting Domain
  source 1..24: mol_type = other RNA
ctcagaagccttcactgtcaactt

SEQ ID NO: 2177 - RNA, 18 nt, synthetic construct
  misc_feature 1..18: note = Targeting Domain
  source 1..18: mol_type = other RNA
aagctagtggataagttt

SEQ ID NO: 2178 - RNA, 19 nt, synthetic construct
  misc_feature 1..19: note = Targeting Domain
  source 1..19: mol_type = other RNA
gaagctagtggataagttt

SEQ ID NO: 2179 - RNA, 20 nt, synthetic construct
  misc_feature 1..20: note = Targeting Domain
  source 1..20: mol_type = other RNA
tgaagctagtggataagttt

SEQ ID NO: 2180 - RNA, 21 nt, synthetic construct
  misc_feature 1..21: note = Targeting Domain
  source 1..21: mol_type = other RNA
ctgaagctagtggataagttt

SEQ ID NO: 2181 - RNA, 22 nt, synthetic construct
  misc_feature 1..22: note = Targeting Domain
  source 1..22: mol_type = other RNA
cctgaagctagtggataagttt

SEQ ID NO: 2182 - RNA, 23 nt, synthetic construct
  misc_feature 1..23: note = Targeting Domain
  source 1..23: mol_type = other RNA
gcctgaagctagtggataagttt

SEQ ID NO: 2183 - RNA, 24 nt, synthetic construct
  misc_feature 1..24: note = Targeting Domain
  source 1..24: mol_type = other RNA
ggcctgaagctagtggataagttt

SEQ ID NO: 2184 - RNA, 18 nt, synthetic construct
  misc_feature 1..18: note = Targeting Domain
  source 1..18: mol_type = other RNA
agctagtggataagtttt

SEQ ID NO: 2185 - RNA, 19 nt, synthetic construct
  misc_feature 1..19: note = Targeting Domain
  source 1..19: mol_type = other RNA
aagctagtggataagtttt

SEQ ID NO: 2186 - RNA, 20 nt, synthetic construct
  misc_feature 1..20: note = Targeting Domain
  source 1..20: mol_type = other RNA
gaagctagtggataagtttt

SEQ ID NO: 2187 - RNA, 21 nt, synthetic construct
  misc_feature 1..21: note = Targeting Domain
  source 1..21: mol_type = other RNA
tgaagctagtggataagtttt

SEQ ID NO: 2188 - RNA, 22 nt, synthetic construct
  misc_feature 1..22: note = Targeting Domain
  source 1..22: mol_type = other RNA
ctgaagctagtggataagtttt

SEQ ID NO: 2189 - RNA, 23 nt, synthetic construct
  misc_feature 1..23: note = Targeting Domain
  source 1..23: mol_type = other RNA
cctgaagctagtggataagtttt

SEQ ID NO: 2190 - RNA, 24 nt, synthetic construct
  misc_feature 1..24: note = Targeting Domain
  source 1..24: mol_type = other RNA
gcctgaagctagtggataagtttt

SEQ ID NO: 2191 - RNA, 22 nt, synthetic construct
  misc_feature 1..22: note = Targeting domain
  source 1..22: mol_type = other RNA
ctgaccatcgacgagaaaggga

SEQ ID NO: 2192 - RNA, 22 nt, synthetic construct
  misc_feature 1..22: note = Targeting domain
  source 1..22: mol_type = other RNA
gacgagaaagggactgaagctg

SEQ ID NO: 2193 - DNA, 74 bp, synthetic construct
  misc_feature 1..74: note = ssODN_4 left HDR arm
  source 1..74: mol_type = other DNA
gggtttgttgaacttgacctcgggggggatagacatgggtatggcctctaaaaacatggccccagcagcctcgg

SEQ ID NO: 2194 - DNA, 22 bp, synthetic construct
  misc_feature 1..22: note = ssODN_1, ssODN_2, ssODN_3 mutated target sequence
  source 1..22: mol_type = other DNA
ctcacaattgataaaaagggca

SEQ ID NO: 2195 - DNA, 22 bp, synthetic construct
  misc_feature 1..22: note = ssODN_4, ssODN_5, ssODN_6, ssODN_7 mutated target sequence
  source 1..22: mol_type = other DNA
tgccctttttatcaattgtgag

SEQ ID NO: 2196 - DNA, 74 bp, synthetic construct
  misc_feature 1..74: note = ssODN_1 right HDR arm
  source 1..74: mol_type = other DNA
ccgaggctgctggggccatgtttttagaggccatacccatgtctatcccccccgaggtcaagttcaacaaaccc

SEQ ID NO: 2197 - DNA, 63 bp, synthetic construct
  misc_feature 1..63: note = ssODN_2 right HDR arm
  source 1..63: mol_type = other DNA
ccgaggctgctggggccatgtttttagaggccatacccatgtctatcccccccgaggtcaagt

SEQ ID NO: 2198 - DNA, 96 bp, synthetic construct
  misc_feature 1..96: note = ssODN_3 right HDR arm
  source 1..96: mol_type = other DNA
ccgaggctgctggggccatgtttttagaggccatacccatgtctatcccccccgaggtcaagttcaacaaaccctttgtcttcttaatgattgaac

SEQ ID NO: 2199 - DNA, 20 bp, synthetic construct
  misc_feature 1..20: note = OliSS76 primer
  source 1..20: mol_type = other DNA
cacgtggtgtcaatccctga

SEQ ID NO: 2200 - DNA, 20 bp, synthetic construct
  misc_feature 1..20: note = OliSS82 primer
  source 1..20: mol_type = other DNA
gctggttgagcaaccttacc

SEQ ID NO: 2201 - DNA, 21 bp, synthetic construct
  misc_feature 1..21: note = oliMES2 primer
  source 1..21: mol_type = other DNA
tgcagttccatgaatggctgc

SEQ ID NO: 2202 - DNA, 25 bp, synthetic construct
  misc_feature 1..25: note = oliMES3 primer
  source 1..25: mol_type = other DNA
cttcttggggactccaagacaggac

SEQ ID NO: 2203 - DNA, 24 bp, synthetic construct
  misc_feature 1..24: note = oliMES103 primer
  source 1..24: mol_type = other DNA
caagttcctggaaaatgaagacag

SEQ ID NO: 2204 - DNA, 21 bp, synthetic construct
  misc_feature 1..21: note = oliMES108 primer
  source 1..21: mol_type = other DNA
acccaggacgctcttcagatc

SEQ ID NO: 2205 - DNA, 23 bp, synthetic construct
  misc_feature 1..23: note = oliMES101 primer
  source 1..23: mol_type = other DNA
tgctatccagaaaacccctcaaa

SEQ ID NO: 2206 - DNA, 20 bp, synthetic construct
  misc_feature 1..20: note = oliMES102 primer
  source 1..20: mol_type = other DNA
ggcgggtggaactgtgttac

SEQ ID NO: 2207 - DNA, 165 bp, synthetic construct
  misc_feature 1..165: note = ssODN_1
  source 1..165: mol_type = other DNA
tcgaggcctgggatcagccttacaacgtgtctctgcttctctcccctccaggccgtgcataaggctgtgctcacaattgataaaaagggcaccgaggctgctggggccatgtttttagaggccatacccatgtctatcccccccgaggtcaagttcaacaaaccc

SEQ ID NO: 2208 - DNA, 88 bp, synthetic construct
  misc_feature 1..88: note = ssODN_1/ssODN_1_Z mutation left (5') homology arm sequence relative to break
  source 1..88: mol_type = other DNA
tcgaggcctgggatcagccttacaacgtgtctctgcttctctcccctccaggccgtgcataaggctgtgctcacaattgataaaaagg

SEQ ID NO: 2209 - DNA, 77 bp, synthetic construct
  misc_feature 1..77: note = ssODN_1/ssODN_1_Z mutation right (3') homology arm sequence relative to break
  source 1..77: mol_type = other DNA
gcaccgaggctgctggggccatgtttttagaggccatacccatgtctatcccccccgaggtcaagttcaacaaaccc

SEQ ID NO: 2210 - DNA, 165 bp, synthetic construct
  misc_feature 1..165: note = ssODN_2
  source 1..165: mol_type = other DNA
gtgagccttgctcgaggcctgggatcagccttacaacgtgtctctgcttctctcccctccaggccgtgcataaggctgtgctcacaattgataaaaagggcaccgaggctgctggggccatgtttttagaggccatacccatgtctatcccccccgaggtcaagt

SEQ ID NO: 2211 - DNA, 99 bp, synthetic construct
  misc_feature 1..99: note = ssODN_2/ssODN_2_Z mutation left (5') homology arm sequence relative to break
  source 1..99: mol_type = other DNA
gtgagccttgctcgaggcctgggatcagccttacaacgtgtctctgcttctctcccctccaggccgtgcataaggctgtgctcacaattgataaaaagg

SEQ ID NO: 2212 - DNA, 66 bp, synthetic construct
  misc_feature 1..66: note = ssODN_2/ssODN_2_Z mutation right (3') homology arm sequence relative to break
  source 1..66: mol_type = other DNA
gcaccgaggctgctggggccatgtttttagaggccatacccatgtctatcccccccgaggtcaagt

SEQ ID NO: 2213 - DNA, 165 bp, synthetic construct
  misc_feature 1..165: note = ssODN_3
  source 1..165: mol_type = other DNA
caacgtgtctctgcttctctcccctccaggccgtgcataaggctgtgctcacaattgataaaaagggcaccgaggctgctggggccatgtttttagaggccatacccatgtctatcccccccgaggtcaagttcaacaaaccctttgtcttcttaatgattgaac

SEQ ID NO: 2214 - DNA, 66 bp, synthetic construct
  misc_feature 1..66: note = ssODN_3 left (5') homology arm sequence relative to break
  source 1..66: mol_type = other DNA
caacgtgtctctgcttctctcccctccaggccgtgcataaggctgtgctcacaattgataaaaagg

SEQ ID NO: 2215 - DNA, 99 bp, synthetic construct
  misc_feature 1..99: note = ssODN_3 right (3') homology arm sequence relative to break
  source 1..99: mol_type = other DNA
gcaccgaggctgctggggccatgtttttagaggccatacccatgtctatcccccccgaggtcaagttcaacaaaccctttgtcttcttaatgattgaac

SEQ ID NO: 2216 - DNA, 165 bp, synthetic construct
  misc_feature 1..165: note = ssODN_4
  source 1..165: mol_type = other DNA
gggtttgttgaacttgacctcgggggggatagacatgggtatggcctctaaaaacatggccccagcagcctcggtgccctttttatcaattgtgagcacagccttatgcacggcctggaggggagagaagcagagacacgttgtaaggctgatcccaggcctcga

SEQ ID NO: 2217 - DNA, 77 bp, synthetic construct
  misc_feature 1..77: note = ssODN_4 left (5') homology arm sequence relative to break
  source 1..77: mol_type = other DNA
gggtttgttgaacttgacctcgggggggatagacatgggtatggcctctaaaaacatggccccagcagcctcggtgc

SEQ ID NO: 2218 - DNA, 88 bp, synthetic construct
  misc_feature 1..88: note = ssODN_4 right (3') homology arm sequence relative to break
  source 1..88: mol_type = other DNA
cctttttatcaattgtgagcacagccttatgcacggcctggaggggagagaagcagagacacgttgtaaggctgatcccaggcctcga

SEQ ID NO: 2219 - DNA, 165 bp, synthetic construct
  misc_feature 1..165: note = ssODN_5
  source 1..165: mol_type = other DNA
acttgacctcgggggggatagacatgggtatggcctctaaaaacatggccccagcagcctcggtgccctttttatcaattgtgagcacagccttatgcacggcctggaggggagagaagcagagacacgttgtaaggctgatcccaggcctcgagcaaggctcac

SEQ ID NO: 2220 - DNA, 132 bp, synthetic construct
  misc_feature 1..132: note = ssODN_5 left (5') homology arm sequence relative to break
  source 1..132: mol_type = other DNA
acttgacctcgggggggatagacatgggtatggcctctaaaaacatggccccagcagcttcagtccacttgacctcgggggggatagacatgggtatggcctctaaaaacatggccccagcagcctcggtgc

SEQ ID NO: 2221 - DNA, 99 bp, synthetic construct
  misc_feature 1..99: note = ssODN_5 right (3') homology arm sequence relative to break
  source 1..99: mol_type = other DNA
cctttttatcaattgtgagcacagccttatgcacggcctggaggggagagaagcagagacacgttgtaaggctgatcccaggcctcgagcaaggctcac

SEQ ID NO: 2222 - DNA, 165 bp, synthetic construct
  misc_feature 1..165: note = ssODN_6
  source 1..165: mol_type = other DNA
gttcaatcattaagaagacaaagggtttgttgaacttgacctcgggggggatagacatgggtatggcctctaaaaacatggccccagcagcctcggtgccctttttatcaattgtgagcacagccttatgcacggcctggaggggagagaagcagagacacgttg

SEQ ID NO: 2223 - DNA, 99 bp, synthetic construct
  misc_feature 1..99: note = ssODN_6 left (5') homology arm sequence relative to break
  source 1..99: mol_type = other DNA
gttcaatcattaagaagacaaagggtttgttgaacttgacctcgggggggatagacatgggtatggcctctaaaaacatggccccagcagcctcggtgc

SEQ ID NO: 2224 - DNA, 66 bp, synthetic construct
  misc_feature 1..66: note = ssODN_5 right (3') homology arm sequence relative to break
  source 1..66: mol_type = other DNA
cctttttatcaattgtgagcacagccttatgcacggcctggaggggagagaagcagagacacgttg

SEQ ID NO: 2225 - DNA, 165 bp, synthetic construct
  misc_feature 1..165: note = ssODN_7
  source 1..165: mol_type = other DNA
ggagacttggtattttgttcaatcattaagaagacaaagggtttgttgaacttgacctcgggggggatagacatgggtatggcctctaaaaacatggccccagcagcctcggtgccctttttatcaattgtgagcacagccttatgcacggcctggaggggagag

SEQ ID NO: 2226 - DNA, 115 bp, synthetic construct
  misc_feature 1..115: note = ssODN_7 left (5') homology arm sequence relative to break
  source 1..115: mol_type = other DNA
ggagacttggtattttgttcaatcattaagaagacaaagggtttgttgaacttgacctcgggggggatagacatgggtatggcctctaaaaacatggccccagcagcctcggtgc

SEQ ID NO: 2227 - DNA, 50 bp, synthetic construct
  misc_feature 1..50: note = ssODN_7 right (3') homology arm sequence relative to break
  source 1..50: mol_type = other DNA
cctttttatcaattgtgagcacagccttatgcacggcctggaggggagag

SEQ ID NO: 2228 - DNA, 165 bp, synthetic construct
  misc_feature 1..165: note = ssODN_1_Z mutation
  source 1..165: mol_type = other DNA
tcgaggcctgggatcagccttacaacgtgtctctgcttctctcccctccaggccgtgcataaggctgtgctcacaattgatgagaagggcaccgaggctgctggggccatgtttttagaggccatacccatgtctatcccccccgaggtcaagttcaacaaaccc

SEQ ID NO: 2229 - DNA, 165 bp, synthetic construct
  misc_feature 1..165: note = ssODN_2_Z mutation
  source 1..165: mol_type = other DNA
gtgagccttgctcgaggcctgggatcagccttacaacgtgtctctgcttctctcccctccaggccgtgcataaggctgtgctcacaattgatgagaagggcaccgaggctgctggggccatgtttttagaggccatacccatgtctatcccccccgaggtcaagt

SEQ ID NO: 2230 - DNA, 22 bp, synthetic construct
  misc_feature 1..22: note = ssODN_1_Z and ssODN_2_Z mutated target sequence
  source 1..22: mol_type = other DNA
ctcacaattgatgagaagggca

SEQ ID NO: 2231 - DNA, 16534 bp, Homo sapiens
  exon 1908..2180: note = Exon Ia
  exon 3590..3781: note = Exon Ib
  exon 3937..4040: note = Exon Ic
  exon 9359..10008: note = Exon II
  exon 11459..11729: note = Exon III
  misc_feature 11675: note = Site of c.863A>T mutation giving rise to E264V ("S mutation")
  exon 12989..13136: note = Exon IV
  exon 13960..15853: note = Exon V
  misc_feature 13990: note = Site of c.1096G>A mutation giving rise to E342K (Z mutation)
  misc_feature 13990: note = Site of c.1096G>A mutation giving rise to E342K ("Z mutation")
  3'UTR 14152..14406
  source 1..16534: mol_type = genomic DNA
gtgactggaggaggtgaaaaaatggtgcaaacttcattcattcattaaatgagttataagaagacagacacaagtgtccattatgctaacagagctctgtgttaaacaccccaccagcatcgcctcatctaagcctcagaagagctatgtgggaaagaaacttttatccctattttatagatgaggaaaccaaggctcagagaactgagggcctcccccggatccaagtccacctagctgcagtcaccccacatcctctgcatgtcacaggtgctcagaaagatgctgaaggcacctggcccttcaccttcggaaagccaaaatgagcacggcccctaaagaggggattgacagccttttctggaaaaaatggaagtttgaatctgaggaggtgtccctcaacaacaggtgctgctccccaaatctggggccaaacgcagcagttgttcccccacttagacccctgagacccatctatatggtttttcagagccaggacacatccccaaaggtcatggcctttggtggttagcattgacttggggcccatcacatgccagaggctgcccgaagtgcttaaatgttattatctcattcgatcttcacagtcctgatggaagtgactcttcttagagtcttcctatctcacagatgaggaaaccgaggcacagagaggttaagtggcttgtctaagagctcacaaaaagagcgatggagctaaggcttggccccagatattagatcccgaacccacgccttaaccagtgacctgcactgactctcaaagaaggaagctggtgcctgggaaggagggtgcatagtgagggtgtgcatggggtgtgtgtgtttgtggggtggccagcactctccgggggcactttgccaatgagttcagctcccatgaagtccactgttgttctcctgaccagccactcagtcttgatttacttggcccagggccactggcacacctcacccccttacccgattccttgctgcagaccccaaatctcgactctcacatccctatccagcccataccacgaggctcccatctccaggcagggccctgtggtggggcagggcctcccccagatgccccttactcatgaccagctcacaggatcttcccatgatgcatttcctctggggggatcagcccagatgctgcaatagacaattgtggaagtaaccaggtggacaagactttccccctcatgtcctggggttcctgggggcacagtatccttgtgaatggccactgagtactcccacccctcccaccacaacccccgggattttgtcctggtgcgtttttccagattatcctagcccttcctcccaggatggatgtccagagcagggcgggggctgagcctagagccctgccaaaagagcaggaccccaaattctgagccccttacttgcctcacctgctcccacccatgctttcttcattcctcctccaaaagccccagctccccactgcaatcccttctgcacccagccaggtcctatgacacacacctccccagtgcacacagacctgcccaactgtggggctgcccactgggcatttcataggtggctcagtcctcttccctctgcagctggccccagaaacctgccagttattggtgccaggtctgtgccaggagggcgaggcctgtcatttctagtaatcctctgggcagtgtgactgtacctcttgcggcaactcaaagggagagggtgacttgtcccgggtcacagagctgaaagggcaggtacaacaggtgacatgccgggctgtctgagtttatgagggcccagtcttgtgtctgccgggcaatgagcaaggctccttcctgtccaagctccccgcccctccccagcctactgcctccacccgaagtctacttcctgggtgggcaggaactgggcactgtgcccagggcatgcactgcctccacgcagcaaccctcagagtcctgagctgaaccaagaaggaggagggggtcgggcctccgaggaaggcctagccgctgctgctgccaggaattccaggttggaggggcggcaacctcctgccagccttcaggccactctcctgtgcctgccagaagagacagagcttgaggagagcttgaggagagcaggaaaggtgggacattgctgctgctgctcactcagttccacaggtgggagggacagcagggcttagagtgggggtcattgtgcagatgggaaaacaaaggcccagagaggggaagaaatgcccaggagctaccgagggcaggcgacctcaaccacagcccagtgctggagctgtgagtggatgtagagcagcggaatatccattcagccagctcaggggaaggacaggggccctgaagccaggggatggagctgcagggaagggagctcagagagaaggggaggggagtctgagctcagtttcccgctgcctgaaaggagggtggtacctactcccttcacagggtaactgaatgagagactgcctggaggaaagctcttcaagtgtggcccaccccaccccagtgacaccagcccctgacacgggggagggagggcagcatcaggaggggctttctgggcacacccagtacccgtctctgagctttccttgaactgttgcattttaatcctcacagcagctcaacaaggtacataccgtcaccatccccattttacagatagggaaattgaggctcggagcggttaaacaactcacctgaggcctcacagccagtaagtgggttccctggtctgaatgtgtgtgctggaggatcctgtgggtcactcgcctggtagagccccaaggtggaggcataaatgggactggtgaatgacagaaggggcaaaaatgcactcatccattcactctgcaagtatctacggcacgtacgccagctcccaagcaggtttgcgggttgcacagcgggcgatgcaatctgatttaggcttttaaagggattgcaatcaagtggggccccactagcctcaaccctgtacctcccctcccctccacccccagcagtctccaaaggcctccaacaaccccagagtgggggccatgtatccaaagaaactccaagctgtatacggatcacactggttttccaggagcaaaaacagaaacaggcctgaggctggtcaaaattgaacctcctcctgctctgagcagcctggggggcagactaagcagagggctgtgcagacccacataaagagcctactgtgtgccaggcacttcacccgaggcacttcacaagcatgcttgggaatgaaacttccaactctttgggatgcaggtgaaacagttcctggttcagagaggtgaagcggcctgcctgaggcagcacagctcttctttacagatgtgcttccccacctctaccctgtctcacggccccccatgccagcctgacggttgtgtctgcctcagtcatgctccatttttccatcgggaccatcaagagggtgtttgtgtctaaggctgactgggtaactttggatgagcggtctctccgctctgagcctgtttcctcatctgtcaaatgggctctaacccactctgatctcccagggcggcagtaagtcttcagcatcaggcattttggggtgactcagtaaatggtagatcttgctaccagtggaacagccactaaggattctgcagtgagagcagagggccagctaagtggtactctcccagagactgtctgactcacgccaccccctccaccttggacacaggacgctgtggtttctgagccaggtacaatgactcctttcggtaagtgcagtggaagctgtacactgcccaggcaaagcgtccgggcagcgtaggcgggcgactcagatcccagccagtggacttagcccctgtttgctcctccgataactggggtgaccttggttaatattcaccagcagcctcccccgttgcccctctggatccactgcttaaatacggacgaggacagggccctgtctcctcagcttcaggcaccaccactgacctgggacagtgaatcgtaagtatgcctttcactgcgagaggttctggagaggcttctgagctccccatggcccaggcaggcagcaggtctggggcaggaggggggttgtggagtgggtatccgcctgctgaggtgcagggcagatggagaggctgcagctgagctcctattttcataataacagcagccatgagggttgtgtcctgtttcccagtcctgcccggtcccccctcggtacctcctggtggatacactggttcctgtaagcagaagtggatgagggtgtctaggtctgcagtcctggcaccccaggatgggggacaccagccaagatacagcaacagcaacaaagcgcagccatttctttctgtttgcacagctcctctgtctgtcgggggctcctgtctgttgtctcctataagcctcaccacctctcctactgcttgggcatgcatctttctccccttctatagatgaggaggttaaggtccagagaggggtggggaggaacgccggctcacattctccatcccctccagatatgaccaggaacagacctgtgccaggcctcagccttacatcaaaatgggcctccccatgcaccgtggacctctgggccctcctgtcccagtggaggacaggaagctgtgaggggcactgtcacccagggctcaagctggcattcctgaataatcgctctgcaccaggccacggctaagctcagtgcgtgattaagcctcataaccctccaaggcagttactagtgtgattcccattttacagatgaggaagatggggacagagaggtgaataactggccccaaatcacacaccatccataattcgggctcaggcacctggctccagtccccaaactcttgaacctggccctagtgtcactgtttctcttgggtctcaggcgctggatggggaacaggaaacctgggctggacttgaggcctctctgatgctcggtgacttcagacagttgctcaacctctctgttctcttgggcaaaacatgataacctttgacttctgtcccctcccctcaccccacccgaccttgatctctgaagtgttggaaggatttaatttttcctgcactgagttttggagacaggtcaaaaagatgaccaaggccaaggtggccagtttcctatagaacgcctctaaaagacctgcagcaatagcagcaagaactggtattctcgagaacttgctgcgcagcaggcacttcttggcattttatgtgtatttaatttcacaatagctctatgacaaagtccacctttctcatctccaggaaactgaggttcagagaggttaagtaacttgtccaaggtcacacagctaatagcaagttgacgtggagcaatctggcctcagagcctttaattttagccacagactgatgctcccctcttcatttagccaggctgcctctgaagttttctgattcaagacttctggcttcagctttgtacacagagatgattcaatgtcaggttttggagtgaaatctgtttaatcccagacaaaacatttaggattacatctcagttttgtaagcaagtagctctgtgatttttagtgagttatttaatgctctttggggctcaatttttctatctataaaatagggctaataatttgcaccttatagggtaagctttgaggacagattagatgatacggtgcctgtaaaacaccaggtgttagtaagtgtggcaatgatggtgacgctgaggctgatgtttgcttagcatagggttaggcagctggcaggcagtaaacagttggataatttaatggaaaatttgccaaactcagatgctgttcactgctgagcaggagccccttcctgctgaaatggtcctggggagtgcagcaggctctccgggaagaaatctaccatctctcgggcaggagctcaacctgtgtgcaggtacagggagggcttcctcacctggtgcccactcatgcattacgtcagttattcctcatccctgtccaaaggattcttttctccattgtacagctatgaagctagtgctcaaagaagtgaagtcatttaccccaggccccctgccagtaagtgacagggcctggtcacacttgggtttatttattgcccagttcaacaggttgtttgaccataggcgagattctcttccctgcaccctgccgggttgctcttggtcccttattttatgctcccgggtagaaatggtgtgagattaggcagggagtggctcgcttccctgtccctggccccgcaaagagtgctcccacctgccccgatcccagaaatgtcaccatgaagccttcattcttttggtttaaagcttggcctcagtgtccgtacaccatggggtacttggccagatggcgactttctcctctccagtcgccctcccaggcactagcttttaggagtgcagggtgctgcctctgatagaagggccaggagagagcaggttttggagtcctgatgttataaggaacagcttgggaggcataatgaacccaacatgatgcttgagaccaatgtcacagcccaattctgacattcatcatctgagatctgaggacacagctgtctcagttcatgatctgagtgctgggaaagccaagacttgttccagctttgtcactgacttgctgtatagcctcaacaaggccctgaccctctctgggcttcaaactcttcactgtgaaaggaggaaaccagagtaggtgatgtgacaccaggaaagatggatgggtgtgggggaatgtgctcctcccagctgtcaccccctcgccaccctccctgcaccagcctctccacctcctttgagcccagaattcccctgtctaggagggcacctgtctcatgcctagccatgggaattctccatctgttttgctacattgaacccagatgccattctaaccaagaatcctggctgggtgcaggggctctcgcctgtaaccccagcactttgggaggccaaggcaggcggatcaagaggtcaggagttcaagacctgcctggccaacacggtgaaacctcagctctactaaaaatacaaaaattagccaggcgtggtggcacacgcctgtaatcccagctatttgggaagctgagacagaagaatttcttgaacccgggaggtggaggtttcagtgagccgagatcacgccactgcactccaccctggcagataaagcgagactctgtctcaaaaaaaacccaaaaacctatgttagtgtacagagggccccagtgaagtcttctcccagccccactttgcacaactggggagagtgaggccccaggaccagaggattcttgctaaaggccaagtggatagtgatggccctgccagggctagaagccacaacctctggccctgaggccactcagcatatttagtgtccccaccctgcagaggcccaactccctcctgaccactgagccctgtaatgatgggggaatttccataagccatgaaggactgcacaaagttcagttgggaagtgaaagagaaattaaagggagatggaaatatacagcactaattttagcaccgtctttagttctaacaacactagctagctgaagaaaaatacaaacatgtattatgtaatgtgtggtctgttccatttggattacttagaggcacgagggccaggagaaaggtggtggagagaaaccagctttgcacttcatttgttgctttattggaaggaaacttttaaaagtccaagggggttgaagaatctcaatatttgttatttccagctttttttctccagtttttcatttcccaaattcaaggacacctttttctttgtattttgttaagatgatggttttggttttgtgactagtagttaacaatgtggctgccgggcatattctcctcagctaggacctcagttttcccatctgtgaagacggcaggttctacctagggggctgcaggctggtggtccgaagcctgggcatatctggagtagaaggatcactgtggggcagggcaggttctgtgttgctgtggatgacgttgactttgaccattgctcggcagagcctgctctcgctggttcagccacaggccccaccactccctattgtctcagccccgggtatgaaacatgtattcctcactggcctatcacctgaagcctttgaatttgcaacacctgccaacccctccctcaaaagagttgccctctcagatccttttgatgtaaggtttggtgttgagacttatttcactaaattctcatacataaacatcactttatgtatgaggcaaaatgaggaccagggagatgaatgacttgtcctggctcatacacctggaaagtgacagagtcagattagatcccaggtctatctgaagttaaaagaggtgtcttttcacttcccacctcctccatctactttaaagcagcacaaacccctgctttcaaggagagatgagcgtctctaaagcccctgacagcaagagcccagaactgggacaccattagtgacccagacggcaggtaagctgactgcaggagcatcagcctattcttgtgtctgggaccacagagcattgtggggacagccccgtctcttgggaaaaaaaccctaagggctgaggatccttgtgagtgttgggtgggaacagctcccaggaggtttaatcacagcccctccatgctctctagctgttgccattgtgcaagatgcatttcccttctgtgcagcagtttccctggccactaaatagtgggattagatagaagccctccaagggcttccagcttgacatgattcttgattctgatctggcccgattcctggataatcgtgggcaggcccattcctcttcttgtgcctcattttcttcttttgtaaaacaatggctgtaccatttgcatcttagggtcattgcagatgtaagtgttgctgtccagagcctgggtgcaggacctagatgtaggattctggttctgctacttcctcagtgacattgaatagctgacctaatctctctggctttggtttcttcatctgtaaaagaaggatattagcattagcacctcacgggattgttacaagaaagcaatgaattaacacatgtgagcacggagaacagtgcttggcatatggtaagcactacgtacattttgctattcttctgattctttcagtgttactgatgtcggcaagtacttggcacaggctggtttaataatccctaggcacttccacgtggtgtcaatccctgatcactgggagtcatcatgtgccttgactcggggcctggcccccccatctctgtcttgcaggacaatgccgtcttctgtctcgtggggcatcctcctgctggcaggcctgtgctgcctggtccctgtctccctggctgaggatccccagggagatgctgcccagaagacagatacatcccaccatgatcaggatcacccaaccttcaacaagatcacccccaacctggctgagttcgccttcagcctataccgccagctggcacaccagtccaacagcaccaatatcttcttctccccagtgagcatcgctacagcctttgcaatgctctccctggggaccaaggctgacactcacgatgaaatcctggagggcctgaatttcaacctcacggagattccggaggctcagatccatgaaggcttccaggaactcctccgtaccctcaaccagccagacagccagctccagctgaccaccggcaatggcctgttcctcagcgagggcctgaagctagtggataagtttttggaggatgttaaaaagttgtaccactcagaagccttcactgtcaacttcggggacaccgaagaggccaagaaacagatcaacgattacgtggagaagggtactcaagggaaaattgtggatttggtcaaggagcttgacagagacacagtttttgctctggtgaattacatcttctttaaaggtaaggttgctcaaccagcctgagctgttcccatagaaacaagcaaaaatattctcaaaccatcagttcttgaactctccttggcaatgcattatgggccatagcaatgcttttcagcgtggattcttcagttttctacacacaaacactaaaatgttttccatcattgagtaatttgaggaaataatagattaaactgtcaaaactactgacagctctgcagaacttttcagagcctttaatgtccttgtgtatactgtatatgtagaatatataatgcttagaactatagaacaaattgtaatacactgcataaagggatagtttcatggaacatactttacacgactctagtgtcccagaatcagtatcagttttgcaatctgaaagacctgggttcaaatcctgcctctaacacaattagcttttgacaaaaacaatgcattctacctctttgaggtgctaatttctcatcttagcatggacaaaataccattcttgctgtcaggtttttttaggattaaacaaatgacaaagactgtggggatggtgtgtggcatacagcaggtgatggactcttctgtatctcaggctgccttcctgcccctgaggggttaaaatgccagggtcctgggggccccagggcattctaagccagctcccactgtcccaggaaaacagcataggggaggggaggtgggaggcaaggccaggggctgcttcctccactctgaggctcccttgctcttgaggcaaaggagggcagtggagagcagccaggctgcagtcagcacagctaaagtcctggctctgctgtggccttagtgggggcccaggtccctctccagccccagtctcctccttctgtccaatgagaaagctgggatcaggggtccctgaggcccctgtccactctgcatgcctcgatggtgaagctctgttggtatggcagaggggaggctgctcaggcatctgcatttcccctgccaatctagaggatgaggaaagctctcaggaatagtaagcagaatgtttgccctggatgaataactgagctgccaattaacaaggggcagggagccttagacagaaggtaccaaatatgcctgatgctccaacattttatttgtaatatccaagacaccctcaaataaacatatgattccaataaaaatgcacagccacgatggcatctcttagcctgacatcgccacgatgtagaaattctgcatcttcctctagttttgaattatccccacacaatctttttcggcagcttggatggtcagtttcagcaccttttacagatgatgaagctgagcctcgagggatgtgtgtcgtcaagggggctcagggcttctcagggaggggactcatggtttctttattctgctacactcttccaaaccttcactcacccctggtgatgcccaccttcccctctctccaggcaaatgggagagaccctttgaagtcaaggacaccgaggaagaggacttccacgtggaccaggtgaccaccgtgaaggtgcctatgatgaagcgtttaggcatgtttaacatccagcactgtaagaagctgtccagctgggtgctgctgatgaaatacctgggcaatgccaccgccatcttcttcctgcctgatgaggggaaactacagcacctggaaaatgaactcacccacgatatcatcaccaagttcctggaaaatgaagacagaaggtgattccccaacctgagggtgaccaagaagctgcccacacctcttagccatgttgggactgaggcccatcaggactggccagagggctgaggagggtgaaccccacatccctgggtcactgctactctgtataaacttggcttccagaatgaggccaccactgagttcaggcagcgccatccatgctccatgaggaggacagtacccaggggtgaggaggtaaaggtctcgtccctggggacttcccactccagtgtggacactgtcccttcccaatatccagtgcccagggcagggacagcagcaccaccacacgttctggcagaaccaaaaaggaacagatgggcttcctggcaaaggcagcagtggagtgtggagttcaagggtagaatgtccctggggggacgggggaagagcctgtgtggcaaggcccagaaaagcaaggttcggaattggaacagccaggccatgttcgcagaaggcttgcgtttctctgtcactttatcggtgctgttagattgggtgtcctgtagtaagtgatacttaaacatgagccacacattagtgtatgtgtgtgcattcgtgattatgcccatgccctgctgatctagttcgttttgtacactgtaaaaccaagatgaaaatacaaaaggtgtcgggttcataataggaatcgaggctggaatttctctgttccatgccagcacctcctgaggtctctgctccaggggttgagaaagaacaaagaggctgagagggtaacggatcagagagcccagagccaagctgcccgctcacaccagaccctgctcagggtggcattgtctccccatggaaaaccagagaggagcactcagcctggtgtggtcactcttctcttatccactaaacggttgtcactgggcactgccaccagccccgtgtttctctgggtgtagggccctggggatgttacaggctgggggccaggtgacccaacactacagggcaagatgagacaggcttccaggacacctagaatatcagaggaggtggcatttcaagcttttgtgattcattcgatgttaacattctttgactcaatgtagaagagctaaaagtagaacaaaccaaagccgagttcccatcttagtgtgggtggaggacacaggagtaagtggcagaaataatcagaaaagaaaacacttgcactgtggtgggtcccagaagaacaagaggaatgctgtgccatgccttgaatttcttttctgcacgacaggtctgccagcttacatttacccaaactgtccattactggaacctatgatctgaagagcgtcctgggtcaactgggcatcactaaggtcttcagcaatggggctgacctctccggggtcacagaggaggcacccctgaagctctccaaggtgagatcaccctgacgaccttgttgcaccctggtatctgtagggaagaatgtgtgggggctgcagctctgtcctgaggctgaggaaggggccgagggaaacaaatgaagacccaggctgagctcctgaagatgcccgtgattcactgacacgggacgtggtcaaacagcaaagccaggcaggggactgctgtgcagctggcactttcggggcctcccttgaggttgtgtcactgaccctgaatttcaactttgcccaagaccttctagacattgggccttgatttatccatactgacacagaaaggtttgggctaagttgtttcaaaggaatttctgactccttcgatctgtgagatttggtgtctgaattaatgaatgatttcagctaaagatgacacttattttggaaaactaaaggcgaccaatgaacaactgcagttccatgaatggctgcattatcttggggtctgggcactgtgaaggtcactgccagggtccgtgtcctcaaggagcttcaagccgtgtactagaaaggagagagccctggaggcagacgtggagtgacgatgctcttccctgttctgagttgtgggtgcacctgagcagggggagaggcgcttgtcaggaagatggacagaggggagccagccccatcagccaaagccttgaggaggagcaaggcctatgtgacagggagggagaggatgtgcagggccagggccgtccagggggagtgagcgcttcctgggaggtgtccacgtgagccttgctcgaggcctgggatcagccttacaacgtgtctctgcttctctcccctccaggccgtgcataaggctgtgctgaccatcgacgagaaagggactgaagctgctggggccatgtttttagaggccatacccatgtctatcccccccgaggtcaagttcaacaaaccctttgtcttcttaatgattgaacaaaataccaagtctcccctcttcatgggaaaagtggtgaatcccacccaaaaataactgcctctcgctcctcaacccctcccctccatccctggccccctccctggatgacattaaagaagggttgagctggtccctgcctgcatgtgactgtaaatccctcccatgttttctctgagtctccctttgcctgctgaggctgtatgtgggctccaggtaacagtgctgtcttcgggccccctgaactgtgttcatggagcatctggctgggtaggcacatgctgggcttgaatccaggggggactgaatcctcagcttacggacctgggcccatctgtttctggagggctccagtcttccttgtcctgtcttggagtccccaagaaggaatcacaggggaggaaccagataccagccatgaccccaggctccaccaagcatcttcatgtccccctgctcatcccccactcccccccacccagagttgctcatcctgccagggctggctgtgcccaccccaaggctgccctcctgggggccccagaactgcctgatcgtgccgtggcccagttttgtggcatctgcagcaacacaagagagaggacaatgtcctcctcttgacccgctgtcacctaaccagactcgggccctgcacctctcaggcacttctggaaaatgactgaggcagattcttcctgaagcccattctccatggggcaacaaggacacctattctgtccttgtccttccatcgctgccccagaaagcctcacatatctccgtttagaatcaggtcccttctccccagatgaagaggagggtctctgctttgttttctctatctcctcctcagacttgaccaggcccagcaggccccagaagaccattaccctatatcccttctcctccctagtcacatggccataggcctgctgatggctcaggaaggccattgcaaggactcctcagctatgggagaggaagcacatcacccattgacccccgcaacccctccctttcctcctctgagtcccgactggggccacatgcagcctgacttctttgtgcctgttgctgtccctgcagtcttcagagggccaccgcagctccagtgccacggcaggaggctgttcctgaatagcccctgtggtaagggccaggagagtccttccatcctccaaggccctgctaaaggacacagcagccaggaagtcccctgggcccctagctgaaggacagcctgctccctccgtctctaccaggaatggccttgtcctatggaaggcactgccccatcccaaactaatctaggaatcactgtctaaccactcactgtcatgaatgtgtacttaaaggatgaggttgagtcataccaaatagtgatttcgatagttcaaaatggtgaaattagcaattctacatgattcagtctaatcaatggataccgactgtttcccacacaagtctcctgttctcttaagcttactcactgacagcctttcactctccacaaatacattaaagatatggccatcaccaagccccctaggatgacaccagacctgagagtctgaagacctggatccaagttctgacttttccccctgacagctgtgtgaccttcgtgaagtcgccaaacctctctgagccccagtcattgctagtaagacctgcctttgagttggtatgatgttcaagttagataacaaaatgtttatacccattagaacagagaataaatagaactacatttcttgcacttatgagctttctgtgaatcagacatccctatgaagtacctcccctggctgtttctcatttactcactgtagcagcactgcgatgtgtgagtatatctgctgtgctcttaaactccaaatctgaggaaactgaggctcagagaggctactggtctcccacaatgtcacacagctcataagtggcaaagctggcttgatgggctacttgttcctctgaaccataccacctcaccacactctccccttcgagggtcacgctaaacttctgcagaggtaattcctccttaaaccagaagggttgctggtggcccacagctcacgcctagcacacttcatgagaaaaacaccctgtgcccagtgtggagcaggcattgagctgaaggtggtgagcagaagctcatccaccagatgttgacacagcccgcagccttgggcgacccacaggactcctcttatttaactggcatttggtaggagaacaggggcagagtcaaagacaagttggctttctggagagcccagggcagggaaggaggtggcagcgctgagggcggtcaccttagacaccatcgttttactttgaagaattgtctgtcacacacgagttgacagtcaggatgggagagaccccattcaaactagcataacctcccagagggaattcctgggctcccctggga

1-413. (canceled)

414. A guide RNA (gRNA) comprising a first targeting domain configured to target an early coding region, the start codon, Exon II, Exon V, or Exon IV, the intron between Exons IC and II, the intron between Exons II and III, the promoter region, or at or near the transcription start site of the SERPINA1 gene.

415. The gRNA of claim 414, wherein the first targeting domain includes a sequence that is the same as, or differs by no more than 3 nucleotides from, a sequence set forth in any of SEQ ID NOs:1140-2190.

416. A composition comprising
a first guide RNA (gRNA) including a first targeting domain configured to target an early coding region, the start codon, Exon II, Exon V, or Exon IV, the intron between Exons IC and II, the intron between Exons II and III, the promoter region, or at or near the transcription start site of the SERPINA1 gene or
a first nucleotide sequence encoding a first targeting domain configured to target an early coding region, the start codon, Exon II, Exon V, or Exon IV, the intron between Exons IC and II, the intron between Exons II and III, the promoter region, or at or near the transcription start site of the SERPINA1 gene.

417. The composition of claim 416, wherein the first targeting domain includes a sequence that is the same as, or differs by no more than 3 nucleotides from, a sequence set forth in any of SEQ ID NOs:1140-2190.

418. The composition of claim 416, further comprising
a second gRNA including a second targeting domain fully or partially complementary with a second target domain of the SERPINA1 gene or
a second nucleotide sequence encoding a second gRNA including a second targeting domain fully or partially complementary with a second target domain of the SERPINA1 gene.

419. The composition of claim 418, wherein the second target domain is configured to target an early coding region, the start codon, Exon II, Exon V, or Exon IV, the intron between Exons IC and II, the intron between Exons II and III, the promoter region, or at or near the transcription start site of the SERPINA1 gene.

420. The composition of claim 419, wherein the second targeting domain includes a sequence that is the same as, or differs by no more than 3 nucleotides from, a sequence set forth in any of SEQ ID NOs: 1140-2190.

421. The composition of claim 416, further comprising
a Cas9 molecule or
a third nucleotide sequence encoding a Cas9 molecule.

422. The composition of claim 416, further comprising
a fourth nucleotide sequence including a complementary DNA (cDNA) encoding alpha-1 antitrypsin (A1AT) protein or comprising a wild-type SERPINA1 gene.

423. The composition of claim 421, wherein the first and third nucleotide sequences are present on a first nucleic acid molecule.

424. The composition of claim 422, wherein the first and third nucleotide sequences are present on a first nucleic acid molecule and the fourth nucleotide sequence is present on a second nucleic acid molecule.

425. The composition of claim 424, wherein the first and second nucleic acid molecules are AAV vectors.

426. An ex vivo or in vitro method of altering a cell, comprising contacting the cell with
a first guide RNA (gRNA) including a first targeting domain configured to target an early coding region, the start codon, Exon II, Exon V, or Exon IV, the intron between Exons IC and II, the intron between Exons II and III, the promoter region, or at or near the transcription start site of the SERPINA1 gene or
a first nucleotide sequence encoding a first gRNA including a first targeting domain configured to target an early coding region, the start codon, Exon II, Exon V, or Exon IV, the intron between Exons IC and II, the intron between Exons II and III, the promoter region, or at or near the transcription start site of the SERPINA1 gene.

427. The method of claim 426, wherein the first targeting domain includes a sequence that is the same as, or differs by no more than 3 nucleotides from, a sequence set forth in any of SEQ ID NOs:1140-2190.

428. The method of claim 426, further comprising
a second gRNA including a second targeting domain fully or partially complementary with a second target domain of the SERPINA1 gene or
a second nucleotide sequence encoding a second gRNA including a second targeting domain fully or partially complementary with a second target domain of the SERPINA1 gene.

429. The method of claim 428, wherein the second target domain is an early coding region, the start codon, Exon II, Exon V, or Exon IV, the intron between Exons IC and II, the intron between Exons II and III, the promoter region, or at or near the transcription start site of the SERPINA1 gene.

430. The method of claim 429, wherein the second targeting domain includes a sequence that is the same as, or differs by no more than 3 nucleotides from, a sequence set forth in any of SEQ ID NOs: 1140-2190.

431. The method of claim 426, further comprising
a Cas9 molecule or
a third nucleotide sequence encoding a Cas9 molecule.

432. The method of claim 426, further comprising
a fourth nucleotide sequence including a complementary DNA (cDNA) encoding alpha-1 antitrypsin (A1AT) protein or comprising a wild-type SERPINA1 gene.

433. The method of claim 431, wherein the first and third nucleotide sequences are present on a first nucleic acid molecule.
